(19) United States
(12) Patent Application Publication
(10) Pub. No.: US 2023/0349888 A1
(43) Pub. Date: Nov. 2, 2023

(54) A HIGH-THROUGHPUT SCREENING METHOD TO DISCOVER OPTIMAL GRNA PAIRS FOR CRISPR-MEDIATED EXON DELETION

(71) Applicant: Duke University, Durham, NC (US)

(72) Inventors: Charles A. Gersbach, Chapel Hill, NC (US); Veronica Gough, Durham, NC (US); Karen Bulaklak, Durham, NC (US)

(21) Appl. No.: 17/921,332

(22) PCT Filed: Apr. 27, 2021
(86) PCT No.: PCT/US2021/029498

§ 371 Date: Oct. 25, 2022

Related U.S. Application Data
(60) Provisional application No. 63/016,238, filed on Apr. 27, 2020.
(60) Provisional application No. 63/016,204, filed on Apr. 27, 2020.
(60) Provisional application No. 63/023,460, filed on May 12, 2020.

(51) Int. Cl. G01N 33/50; C12N 15/11; C12N 9/22; C12N 15/10; C12N 15/90; C12N 15/85; C07K 14/47; A61K 49/00; A01K 67/027

(52) U.S. Cl. CPC G01N 33/5088; C12N 15/11; C12N 15/111; C12N 9/22; C12N 15/1082; C12N 15/907; C12N 15/8509; C07K 14/4707; A61K 49/0008; A01K 67/0276; C12N 2015/8536; C12N 2310/20; C12N 2800/80; A01K 2267/0306; A01K 2227/105; A01K 2217/056; A01K 2217/072

(57) ABSTRACT

Disclosed herein are methods of using probes for high-throughput screening of guide RNA (gRNA) efficiency for Clustered Regularly Interspaced Short Palindromic Repeats (CRISPR)/CRiSPR-associated (Cas)-based genome editing systems. Further disclosed herein is a humanized transgenic mouse model that recapitulates the severe DMD pathology of human patients. The mouse model may be used for determining the feasibility of CRISPR-based therapies for the correction of the human dystrophin gene by gene editing and methods of use.

### CROSS-REFERENCE TO RELATED APPLICATIONS

[0001] This application claims priority to U.S. Provisional Patent Application No. 63/016,238, filed Apr. 27, 2020, U.S. Provisional Patent Application No. 63/016,204, filed Apr. 27, 2020, and U.S. Provisional Patent Application No. 63/023,460, filed May 12, 2020, each of which is incorporated herein by reference in its entirety.

### STATEMENT REGARDING FEDERALLY SPONSORED RESEARCH

[0002] This invention was made with government support under grant R01AR069085 awarded by the National Institutes of Health. The government has certain rights in the invention.

### FIELD

[0003] This disclosure relates to the field of gene expression alteration, genome engineering, and genomic alteration of genes using Clustered Regularly Interspaced Short Palindromic Repeats (CRISPR)/CRISPR-associated (Cas) 9-based systems and viral delivery systems. The present disclosure also relates to high-throughput screening of CRISPR/Cas9-based systems for identification of high efficiency gRNA pairs. The present disclosure further relates to genetically modified animals and screening agents and use of genetically modified animals for treatment of diseases such as Duchenne muscular dystrophy (DMD).

### INTRODUCTION

[0004] Exon skipping or deletion has proven to be a powerful strategy for the correction of genetic diseases, where removal of an exon can correct reading frames distorted by aberrant splicing or other mutations. For example, Duchene muscular dystrophy (DMD), often caused by the deletion of one or more exons in the DMD gene, has a number of promising exon-skipping strategies. Antisense oligonucleotides have been used to force exon skipping during RNA splicing, but the effects are transient and require re-administration. CRISPR-Cas9 can also be directed to cleave the intronic regions on either side of an out-of-frame exon, enabling the non-homologous end joining (NHEJ) repair process to permanently remove the exon from the genome. This strategy of delivering Staphylococcus aureus Cas9 (SaCas9) and two gRNAs with AAV has shown some efficacy in vivo, with exon deletion efficiencies ranging from 2-4% in the heart and skeletal muscle. These DNA editing rates restored dystrophin protein to almost 10% of wild-type levels in skeletal muscle, however, higher protein expression is usually required for an asymptomatic phenotype.

[0005] Optimizing gRNA design is key because there is a wide range of on-target activity between different genomic target sites, and the large size of introns (tens to hundreds of kb) provide ample space for finding gRNAs with desirable on- and off-target editing profiles. Previous studies have not taken advantage of this targeting range or sequence diversity, only testing tens of gRNAs. Moreover, previous studies have used high individual gRNA activity to predict optimal gRNA pairs, even though it is established that the context of the gRNA pair is an important parameter in determining genomic deletion efficiency. Further, the accurate measurement of relative deletion efficiencies is difficult—the low, cell type-specific expression of genes such as dystrophin precludes the use of a genetic reporter and PCR-based assays are heavily biased by the wide range of deletion sizes. Thus, there remains a need for a high-throughput screening method to identify novel gRNA pairs that exhibit high efficiency in addition to desirable on- and off-target effects.

### SUMMARY

[0006] In an aspect, the disclosure relates to a method of screening for a pair of gRNA molecules for editing a genomic nucleic acid in a subject. The method may include (a) generating a plurality of pairs of gRNA molecules, each pair comprising a first gRNA and a second gRNA, wherein the first gRNA targets a first nucleic acid sequence and the second gRNA targets a second nucleic acid sequence; (b) expressing a Cas9 protein or a fusion protein comprising the Cas9 protein, and the plurality of pairs of gRNA molecules in a plurality of cells, wherein one pair of gRNA molecules is expressed in a cell, and wherein the first gRNA directs the Cas9 protein or fusion protein to cut the first nucleic acid sequence and the second gRNA directs the Cas9 protein or fusion protein to cut the second nucleic acid sequence. In some embodiments, expressing the Cas9 protein or the fusion protein comprising the Cas9 protein, and the plurality of pairs of gRNA molecules in the plurality of cells, wherein one pair of gRNA molecules is expressed in a cell, and wherein the first gRNA directs the Cas9 protein or fusion protein to cut the first nucleic acid sequence and the second gRNA directs the Cas9 protein or fusion protein to cut the second nucleic acid sequence in step (b), thereby forms an excised nucleic acid and a new junction in the genomic nucleic acid. In some embodiments, the excised nucleic acid is in-frame. In some embodiments, the genomic nucleic acid comprises at least one exon of a dystrophin gene, wherein the first nucleic acid sequence comprises a first intron of the dystrophin gene and the second nucleic acid sequence comprises a second intron of the dystrophin gene, and wherein the first intron is adjacent to one side of the at least one exon and the second intron is adjacent to the other side of the at least one exon. In some embodiments, the at least one exon is in between the first and second introns in the genomic nucleic acid. In some embodiments, the genomic nucleic acid comprises two or more exons of a dystrophin gene, wherein the first nucleic acid sequence comprises a first intron of the dystrophin gene and the second nucleic acid sequence comprises a second intron of the dystrophin gene, and wherein the first intron is adjacent to one side of the two or more exons and the second intron is adjacent to the other side of the two or more exons. In some embodiments, the two or more exons are in between the first and second introns in the genomic nucleic acid. In some embodiments, the expression is effected by transfecting the plurality of cells with a plurality of vectors, wherein each cell is transfected with a first vector encoding one pair of gRNA molecules and a second vector encoding the Cas9 protein or fusion protein, wherein each cell is transfected with a different first vector encoding a different pair of gRNA molecules. In some embodiments, the first vector and second vector are each a viral vector. In some embodiments, the viral vector is a lentiviral vector, a AAV vector, or an adenoviral vector. In some embodiments, the method further includes (c) isolating the genomic nucleic acid from the plurality of cells; and/or (d) contacting the genomic nucleic acid with a first pool of probes, wherein one or more different probes specifically bind to each new junction and a portion of the first nucleic acid sequence; and/or (e) isolating the genomic nucleic acid bound to the first pool of probes; and/or (f) contacting the genomic nucleic acid bound to the first pool of probes with a second pool of probes, wherein one or more different probes specifically bind to each new junction and a portion of the second nucleic acid sequence; and/or (g) isolating the genomic nucleic acid bound to the first and second pools of probes; and/or (h) sequencing the isolated genomic nucleic acid bound to the first and second pools of probes; and/or (i) aligning the sequenced isolated genomic nucleic acid to identify the sequenced new junctions; and/or (j) assigning each sequenced new junction to the corresponding pair of gRNA molecules. In some embodiments, step (i) comprises computationally aligning the sequences of the isolated genomic nucleic acid to identify the sequenced new junctions. In some embodiments, the method further includes identifying the pair of gRNA molecules having a greater number of sequenced new junctions as the pair of gRNA molecules having greater efficiency. In some embodiments, the probes each have a length of about 100 bp to about 140 bp. In some embodiments, the excised nucleic acid comprises exon 51 of the dystrophin gene. In some embodiments, the excised nucleic acid comprises exons 45-55 of the dystrophin gene. In some embodiments, the first nucleic acid sequence is within intron 50 of the dystrophin gene. In some embodiments, the second nucleic acid sequence is within intron 51 of the dystrophin gene. In some embodiments, the first nucleic acid sequence is within intron 44 of the dystrophin gene. In some embodiments, the second nucleic acid sequence is within intron 55 of the dystrophin gene. In some embodiments, the probes are biotinylated probes.

[0007] In a further aspect, the disclosure relates to a pair of gRNA molecules identified by a method as detailed herein.

[0008] Another aspect of the disclosure provides a CRISPR/Cas9 system comprising a pair of gRNA molecules as detailed herein.

[0009] Another aspect of the disclosure provides a gRNA molecule that binds and targets a polynucleotide sequence. In some embodiments, the gRNA molecule binds or is encoded by a polynucleotide comprising a sequence selected from SEQ ID NOs: 55-78, or the gRNA molecule comprises a polynucleotide sequence selected from SEQ ID NOs: 79-102.

[0010] Another aspect of the disclosure provides a transgenic mouse whose genome comprises: a mutation in the mouse dystrophin gene; a mutant human dystrophin gene on chromosome 5; and a mutation in the mouse utrophin gene. In some embodiments, the mutation in the mouse dystrophin gene comprises an insertion or deletion in the mouse dystrophin gene that prevents protein expression from the mouse dystrophin gene. In some embodiments, the mutation in the mouse dystrophin gene comprises a premature stop codon in exon 23 of the mouse dystrophin gene. In some embodiments, the mutant human dystrophin gene has at least one exon deleted. In some embodiments, the mutant human dystrophin gene has exon 52 deleted. In some embodiments, the mutation in the mouse utrophin gene is a functional deletion of the mouse utrophin gene. In some embodiments, the mutation in the mouse utrophin gene comprises an insertion or deletion in the mouse utrophin gene that prevents protein expression from the mouse utrophin gene. In some embodiments, the mutation in the mouse utrophin gene comprises an insertion in exon 7 of the mouse utrophin gene. In some embodiments, the mutation in the mouse utrophin gene comprises a deletion of the entire mouse utrophin gene. In some embodiments, the mouse is heterozygous for the mutation in the mouse utrophin gene. In some embodiments, the mouse is homozygous for the mutation in the mouse utrophin gene. In some embodiments, the mouse has reduced life span, reduced body mass, reduced body strength, reduced motor coordination, reduced balance, and/or reduced forelimb strength as compared to a wild-type mouse. In some embodiments, the mouse has reduced life span, reduced body mass, reduced body strength, reduced motor coordination, reduced balance, and/or reduced forelimb strength as compared to a control mouse whose genome comprises a wild-type utrophin gene and a mutation in the mouse dystrophin gene. In some embodiments, the mouse has reduced lifespan, reduced body mass, reduced body strength, reduced motor coordination, reduced balance, and/or reduced forelimb strength as compared to a control mouse whose genome comprises a wild-type utrophin gene, a mutation in the mouse dystrophin gene, and a mutant human dystrophin gene. In some embodiments, the mouse has increased muscle damage as compared to (i) a wild-type mouse, (ii) a control mouse whose genome comprises a wild-type utrophin gene and a mutation in the mouse dystrophin gene, and/or (iii) a control mouse whose genome comprises a wild-type utrophin gene, a mutation in the mouse dystrophin gene, and a mutant human dystrophin gene. In some embodiments, the muscle damage comprises one or more of degeneration of the muscle, fibrosis of the muscle, and elevated serum creatine kinase. In some embodiments, the mouse does not exhibit detectable dystrophin protein in heart or skeletal muscle. In some embodiments, the mouse is a hDMDΔ52/mdx/Utrn KO mouse.

[0011] Another aspect of the disclosure provides an isolated cell or biological material obtained from a mouse as detailed herein. In some embodiments, the biological material includes a protein, a lipid, a nucleotide, fat, muscle, or a tissue.

[0012] Another aspect of the disclosure provides a method of correcting a dystrophin gene mutation. The method may include administering to a mouse as detailed herein a CRISPR/Cas9 gene editing composition. In some embodiments, the CRISPR/Cas9 gene editing composition comprises: (a) at least one guide RNA (gRNA) targeting the mutant human dystrophin gene; and (b) a Cas9 protein or a fusion protein comprising the Cas9 protein. In some embodiments, the CRISPR/Cas9 gene editing composition comprises a first gRNA and a second gRNA, wherein the first gRNA and the second gRNA are configured to form a first and a second double strand break in a first and a second intron flanking exon 51 of the mutant human dystrophin gene, respectively, thereby deleting exon 51. In some embodiments, the CRISPR/Cas9 gene editing composition comprises a first gRNA and a second gRNA, wherein the first gRNA and the second gRNA are configured to form a first and a second double strand break in a first and a second intron flanking exons 45-55 of the mutant human dystrophin gene, respectively, thereby deleting exons 45-55. In some embodiments, the dystrophin gene mutation is corrected in a cell of the mouse, and the cell may be a muscle cell, a satellite cell, or an iPSC/iCM. In some embodiments, the correction restores the reading frame of the human dystrophin gene. In some embodiments, the correction results in expression of an at least partially functional human dystrophin protein.

[0013] Another aspect of the disclosure provides a gamete produced by a mouse as detailed herein. In some embodiments, the gamete does not encode a functional mouse dystrophin protein or a functional mouse utrophin protein.

[0014] Another aspect of the disclosure provides an isolated mouse cell, or a progeny cell thereof, isolated from a mouse as detailed herein.

[0015] Another aspect of the disclosure provides a primary cell culture or a secondary cell line derived from a mouse as detailed herein.

[0016] Another aspect of the disclosure provides a tissue or organ explant or culture thereof, derived from a mouse as detailed herein.

[0017] Another aspect of the disclosure provides method of screening therapeutic agents for treating Duchenne muscular dystrophy (DMD). The method may include administering to a mouse as detailed herein one or more therapeutic agents. In some embodiments, the one or more therapeutic agents comprises a small molecule, anti-sense RNA, vector, CRISPR/Cas gene editing system, or biological agent, or a combination thereof. In some embodiments, the vector is a viral vector encoding a gene of interest. In some embodiments, the viral vector is an AAV vector. In some embodiments, the mouse after administration of the one or more therapeutic agents exhibits increased lifespan, reduced body mass, increased body strength, increased motor coordination, increased balance, increased forelimb strength, reduced muscle injury, and/or reduced CK level compared to before administration of the one or more therapeutic agents. In some embodiments, the mouse after administration of the one or more therapeutic agents exhibits increased expression of a dystrophin gene as compared to before administration of the one or more therapeutic agents. In some embodiments, the dystrophin gene is a truncated human dystrophin gene. In some embodiments, the truncated human dystrophin gene comprises a plurality of deletions relative to a wild-type human dystrophin gene. In some embodiments, at least one of the deletions is in exon 52.

[0018] The disclosure provides for other aspects and embodiments that will be apparent in light of the following detailed description and accompanying figures.

### BRIEF DESCRIPTION OF THE DRAWINGS

[0019] FIG. 1A, FIG. 1B, FIG. 1C, and FIG. 1D are schematics for the method of screening a pool of gRNA pairs for exon deletion. FIG. 1A shows the design of gRNAs. FIG. 1B shows the transduction of a stable saCas9 cell line with a lentiviral gRNA pair library. FIG. 1C shows the harvest gDNA, library prep, and enrichment for junctions with biotinylated probes. FIG. 1D shows the sequence junctions to determine the frequency of each unique junction created after a deletion event.

[0020] FIG. 2 is a schematic of the biotinylated probe design.

[0021] FIG. 3 shows an experiment using the enrichment and sequencing method on cells that only received a single gRNA pair.

[0022] FIG. 4 shows the frequency with which deletion-making gRNA pairs were identified by sequencing. The frequency with which deletion-making gRNA pairs were identified by sequencing was normalized by initial gRNA abundance and bias introduced by probe hybridization. For all 2.080 pairs shown, many were not detected, but several pairs were detected with high frequency.

[0023] FIG. 5 shows the top 25 pairs of gRNAs identified by sequencing. The gray bar indicates a previously used gRNA pair that was identified with a conventional low-throughput method. Each data point represents the value from a replicate, n=4.

[0024] FIG. 6 is a schematic of the breeding pair and step 1 of the breeding scheme.

[0025] FIG. 7 is a schematic of steps 2-4 of the breeding scheme.

[0026] FIG. 8A, FIG. 88, FIG. 8C, and FIG. 8D show whole body strength, balance, and motor coordination of the various dystrophin and utrophin genotypes using the rotarod test. FIG. 8A is rotarod performance at the 8-week timepoint. FIG. 8B is rotarod performance at the 12-week timepoint. FIG. 8C is rotarod performance at the 16-week timepoint. FIG. 8D is rotarod performance from 6 to 24 weeks. N=12 for each group, except Utrn KO (N=4-12 depending on age). *P<0.05, **P<0.001, ***P<0.0001, ****P<0.00001.

[0027] FIG. 9A, FIG. 9B, and FIG. 9C show forelimb grip strength of the various dystrophin and utrophin genotypes using the grip-strength test. FIG. 9A is grip force performance at the 8-week timepoint. FIG. 9B is grip force performance at the 12-week timepoint. FIG. 9C is grip force performance at the 16-week timepoint. N=12 for 8 and 12 weeks. N=4-12 at 16 weeks. *P<0.05, **P<0.001, ***P<0.0001, ****P<0.00001. Results from a rotarod assay are shown in FIG. 9D. T compares with Utrn (+/+), and #compares with Utrn (+/−).

[0028] FIG. 10A and FIG. 10B show body and muscle mass measurements of the various dystrophin and utrophin genotypes. FIG. 10A is body mass from 6 to 24 weeks. FIG. 10B is muscle mass at 24 weeks. N=12 for each group, except Utrn KO (N=4-12 depending on age). ***P<0.0001.

[0029] FIG. 11 shows survival over 24 weeks of the various dystrophin and utrophin genotypes. N=12 for each group at start.

[0030] FIG. 12A, FIG. 12B, FIG. 12C, and FIG. 12D show H&E staining of diaphragm muscle to assess dystrophic pathology in the various dystrophin and utrophin genotypes at 24 weeks of age. FIG. 12A is the hDMD/mdx genotype. FIG. 12B is the hDMDΔ52/mdx genotype. FIG. 12C is the hDMDΔ52/mdx/Utrn het genotype. FIG. 12D is the hDMDΔ52/mdx/Utrn KO genotype. Images are 10× magnification.

[0031] FIG. 13A, FIG. 13B, FIG. 13C, and FIG. 13D show Masson trichrome staining of diaphragm muscle to assess fibrosis in the various dystrophin and utrophin genotypes at 24 weeks of age. FIG. 13A is the hDMD/mdx genotype. FIG. 13B is the hDMDΔ52/mdx genotype. FIG. 13C is the hDMDΔ52/mdx/Utrn het genotype. FIG. 13D is the hDMDΔ52/mdx/Utrn KO genotype. Images are 10× magnification.

[0032] FIG. 14A shows levels of creatine kinase in the serum of the various dystrophin and utrophin genotypes at 24 weeks of age. N=4-8 for each group. *P<0.05, **P<0.0001 compared to hDMD/mdx. FIG. 14B shows the body mass of the various dystrophin and utrophin genotypes at 24 weeks of age. FIG. 14C shows percent survival of the various dystrophin and utrophin genotypes at 24 weeks of age.

[0033] FIG. 15 is a schematic of CRISPR/Cas9 treatment of the various dystrophin and utrophin mice.

[0034] FIG. 16 shows PCR (top) and Western blot (bottom) of utrophin heterozygous and homozygous knockout mice. CRISPR/Cas9 treatment restores dystrophin reading frame and protein expression. 3.125 μg of protein lysate was loaded for the hDMD/mdx positive control. One mouse per treatment group per genotype is represented.

[0035] FIG. 17A and FIG. 17B show immunofluorescent staining of hDMDΔ52/mdx/Utrn het neonate mice treated with CRISPR/Cas9. FIG. 17A is the AAV9-control CRISPR/Cas9. FIG. 17B is the AAV9-ΔExon 51 CRISPR. Red is dystrophin and blue is DAPI. Images are 10× magnification, tissue is from mice 8 weeks of age.

[0036] FIG. 18A and FIG. 18B show immunofluorescent staining of hDMDΔ52/mdx/Utrn KO neonate mice treated with CRISPR/Cas9. FIG. 18A is the AAV9-control CRISPR/Cas9. FIG. 18B is the AAV9-ΔExon 51 CRISPR. Red is dystrophin and blue is DAPI. Images are 10× magnification, tissue is from mice 8 weeks of age. FIG. 18C is a graph showing increased serum creatine kinase (CK) after CRISPR-ΔExon 51 treatment in both hDMDΔ52/mdx/Utrn het and hDMDΔ52/mdx/Utrn KO mice.

[0037] FIG. 19A, FIG. 19B, and FIG. 19C show immunofluorescent staining of the tibialis anterior of hDMDΔ52/mdx/Utrn KO adult mice treated with CRISPR/Cas9. FIG. 19A is hDMD/mdx mice untreated. FIG. 19B is hDMDΔ52/mdx/Utrn KO mice treated with AAV9-control CRISPR/Cas9. FIG. 19C is hDMDΔ52/mdx/Utrn KO mice treated with AAV9-ΔExon 51 CRISPR. Red is dystrophin and blue is DAPI. Images are 10× magnification, tissue is from mice 16 weeks of age. FIG. 19D is a graph of percent dystrophin positive fibers in various tissues. Dystrophin positive fibers were quantified using 5 images per mouse, N=3 per group. FIG. 19E is a survival curve representing each treatment group showing exon 51 deletion improved survival in Utrn KO mice. Log-rank test was performed. N=4-6 per group, *P=0.0251. FIG. 19F is a graph showing exon 51 deletion improved motor function in Utrn KO mice. Forelimb grip strength was measured at 10 weeks and normalized to body weight. N=3-4 per group.

### DETAILED DESCRIPTION

[0038] As described herein, certain methods and engineered gRNAs have been discovered to be useful with CRISPR/CRISPR-associated (Cas) 9-based gene editing systems for altering the expression (i.e., genome engineering) and correcting or reducing the effects of mutations in the dystrophin gene involved in genetic diseases such as DMD. The disclosed high-throughput CRISPR/Cas9 gRNA screening method was generated to yield novel junctions that are more amenable to clinical translation. For example, introns of the dystrophin gene are large and many different sequences within the introns can be targeted with gRNAs. gRNAs targeting each intronic target sequence have varying on- and off-target effects that need to be optimized. The disclosed method provides a process to screen thousands of gRNA pairs to identify gRNA pairs that mediate high efficiency exon deletion with few to no off-target effects. Since each gRNA pair yields a unique junction that is created after a deletion event, the frequency of each junction is a direct measure of the deletion efficiency for a gRNA pair. The gRNAs identified by the disclosed method, which target human dystrophin gene sequences, can be used with the CRISPR/Cas9-based system to target regions of the human dystrophin gene, such as exon 51, causing genomic deletions of this exon in order to restore expression of functional dystrophin in cells of DMD patients. The method provides a means of identifying gRNA pairs that are effective, efficient, and facilitate successful genome modification, as well as provide a means to rewrite the human genome for therapeutic applications and target model species for basic science applications.

[0039] In addition, the screening method may comprise an enrichment and sequencing method that can be used to detect unique intron-intron junctions as well as detect perfect ligation of gRNA cut-sites. The method may also be used to quantify the level of exon deletion made by each gRNA pair. The screening method relies only on genomic DNA as an output and does not require a reporter. Therefore, the method can be applied on any locus in any cell type. Thus, it can be easily adapted to optimize gRNA pairs for any genetic disease where a targeted deletion is a viable therapeutic strategy.

[0040] Further disclosed herein is a mouse model to better recapitulate the human DMD phenotype. To exacerbate dystrophic pathology in animal models, many different approaches have been taken, including chemical treatment and various genetic knockouts. The utrophin protein, which is normally expressed in the neuromuscular junction, shares functional domains with dystrophin. Overexpression of utrophin has resulted in muscle membrane localization, similar to dystrophin, and functional improvements in dystrophic animal models. Utrophin may compensate for dystrophin. The humanized mouse model detailed herein includes a dystrophin and utrophin double knockout.

[0041] The disclosed mouse model improves clinical translation of therapeutics tested in mouse models. For example, mouse models that express a wild-type utrophin gene and a mutation in the mouse dystrophin gene or a mutation in the mouse dystrophin gene and a mutant human dystrophin gene display a mild DMD pathology and phenotype. In contrast, the disclosed mouse models do not express utrophin or dystrophin. hDMDΔ52/mdx mice were crossed with mice lacking the murine utrophin gene to generate hDMDΔ52/mdx/Utrn KO mice. The animal models and methods detailed herein may be useful for studying genetic diseases, such as DMD, and altering expression of dystrophin and utrophin using gene editing systems, such as CRISPR-Cas9. The disclosed mouse model can be used to assess the efficacy of therapeutics using phenotypic measurements such as motor function and lifespan.

[0042] Also described herein are methods for delivering CRISPR/Cas9-based gene editing systems and multiple gRNAs to target the human dystrophin gene. The CRISPR/Cas9-based gene editing system can be delivered using an AAV vector, including modified AAV vectors. Provided herein are ways to deliver this class of therapeutics to mouse models that is effective, efficient, and facilitates successful genome modification, as well as provide a means to rewrite the human genome for therapeutic applications and target animal models for basic science applications. The methods may relate to the use of a single AAV vector for the delivery of all of the editing components necessary for the excision of exon 51 of dystrophin.

### 1. Definitions

[0043] Unless otherwise defined, all technical and scientific terms used herein have the same meaning as commonly understood by one of ordinary skill in the art. In case of conflict, the present document, including definitions, will control. Preferred methods and materials are described below, although methods and materials similar or equivalent to those described herein can be used in practice or testing of the present invention. All publications, patent applications, patents and other references mentioned herein are incorporated by reference in their entirety. The materials, methods, and examples disclosed herein are illustrative only and not intended to be limiting.

[0044] The terms “comprise(s),” “include(s),” “having,” “has,” “can,” “contain(s),” and variants thereof, as used herein, are intended to be open-ended transitional phrases, terms, or words that do not preclude the possibility of additional acts or structures. The singular forms “a,” “and,” and “the” include plural references unless the context clearly dictates otherwise. The present disclosure also contemplates other embodiments “comprising,” “consisting of,” and “consisting essentially of,” the embodiments or elements presented herein, whether explicitly set forth or not.

[0045] For the recitation of numeric ranges herein, each intervening number there between with the same degree of precision is explicitly contemplated. For example, for the range of 6-9, the numbers 7 and 8 are contemplated in addition to 6 and 9, and for the range 6.0-7.0, the number 6.0, 6.1, 6.2, 6.3, 6.4, 6.5, 6.6, 6.7, 6.8, 6.9, and 7.0 are explicitly contemplated.

[0046] The term “about” or “approximately” as used herein as applied to one or more values of interest, refers to a value that is similar to a stated reference value, or within an acceptable error range for the particular value as determined by one of ordinary skill in the art, which will depend in part on how the value is measured or determined, such as the limitations of the measurement system. In certain aspects, the term “about” refers to a range of values that fall within 20%, 19%, 18%, 17%, 16%, 15%, 14%, 13%, 12%, 11%, 10%, 9%, 8%, 7%, 6%, 5%, 4%, 3%, 2%, 1%, or less in either direction (greater than or less than) of the stated reference value unless otherwise stated or otherwise evident from the context (except where such number would exceed 100% of a possible value). Alternatively, “about” can mean within 3 or more than 3 standard deviations, per the practice in the art. Alternatively, such as with respect to biological systems or processes, the term “about” can mean within an order of magnitude, preferably within 5-fold, and more preferably within 2-fold, of a value.

[0047] “Adeno-associated virus” or “AAV” as used interchangeably herein refers to a small virus belonging to the genus Dependovirus of the Parvoviridae family that infects humans and some other primate species. AAV is not currently known to cause disease and consequently the virus causes a very mild immune response.

[0048] “Amino acid” as used herein refers to naturally occurring and non-natural synthetic amino acids, as well as amino acid analogs and amino acid mimetics that function in a manner similar to the naturally occurring amino acids. Naturally occurring amino acids are those encoded by the genetic code. Amino acids can be referred to herein by either their commonly known three-letter symbols or by the one-letter symbols recommended by the IUPAC-IUB Biochemical Nomenclature Commission. Amino acids include the side chain and polypeptide backbone portions.

[0049] “Binding region” as used herein refers to the region within a target region that is recognized and bound by the CRISPR/Cas-based gene editing system.

[0050] “Clustered Regularly Interspaced Short Palindromic Repeats” and “CRISPRs”, as used interchangeably herein, refers to loci containing multiple short direct repeats that are found in the genomes of approximately 40% of sequenced bacteria and 90% of sequenced archaea.

[0051] “Coding sequence” or “encoding nucleic acid” as used herein means the nucleic acids (RNA or DNA molecule) that comprise a nucleotide sequence which encodes a protein. The coding sequence can further include initiation and termination signals operably linked to regulatory elements including a promoter and polyadenylation signal capable of directing expression in the cells of an individual or mammal to which the nucleic acid is administered. The coding sequence may be codon optimized.

[0052] “Complement” or “complementary” as used herein means a nucleic acid can mean Watson-Crick (e.g., A-T/U and C-G) or Hoogsteen base pairing between nucleotides or nucleotide analogs of nucleic acid molecules. “Complementarity” refers to a property shared between two nucleic acid sequences, such that when they are aligned antiparallel to each other, the nucleotide bases at each position will be complementary.

[0053] The terms “control,” “reference level,” and “reference” are used herein interchangeably. The reference level may be a predetermined value or range, which is employed as a benchmark against which to assess the measured result. “Control group” as used herein refers to a group of control subjects. The predetermined level may be a cutoff value from a control group. The predetermined level may be an average from a control group. Cutoff values (or predetermined cutoff values) may be determined by Adaptive Index Model (AIM) methodology. Cutoff values (or predetermined cutoff values) may be determined by a receiver operating curve (ROC) analysis from biological samples of the patient group. ROC analysis, as generally known in the biological arts, is a determination of the ability of a test to discriminate one condition from another, e.g., to determine the performance of each marker in identifying a patient having CRC. A description of ROC analysis is provided in P. J. Heagerty et al. (Biometrics 2000, 56, 337-44), the disclosure of which is hereby incorporated by reference in its entirety. Alternatively, cutoff values may be determined by a quartile analysis of biological samples of a patient group. For example, a cutoff value may be determined by selecting a value that corresponds to any value in the 25th-75th percentile range, preferably a value that corresponds to the 25th percentile, the 50th percentile or the 75th percentile, and more preferably the 75th percentile. Such statistical analyses may be performed using any method known in the art and can be implemented through any number of commercially available software packages (e.g., from Analyse-it Software Ltd., Leeds, UK; StataCorp LP, College Station, TX; SAS Institute Inc., Cary, NC.). The healthy or normal levels or ranges for a target or for a protein activity may be defined in accordance with standard practice. A control may be an subject or cell without an agonist as detailed herein. A control may be a subject, or a sample therefrom, whose disease state is known. The subject, or sample therefrom, may be healthy, diseased, diseased prior to treatment, diseased during treatment, or diseased after treatment, or a combination thereof.

[0054] “Correcting”, “gene editing,” and “restoring” as used herein refers to changing a mutant gene that encodes a dysfunctional protein or truncated protein or no protein at all, such that a full-length functional or partially full-length functional protein expression is obtained. Correcting or restoring a mutant gene may include replacing the region of the gene that has the mutation or replacing the entire mutant gene with a copy of the gene that does not have the mutation with a repair mechanism such as homology-directed repair (HDR). Correcting or restoring a mutant gene may also include repairing a frameshift mutation that causes a premature stop codon, an aberrant splice acceptor site or an aberrant splice donor site, by generating a double stranded break in the gene that is then repaired using non-homologous end joining (NHEJ). NHEJ may add or delete at least one base pair during repair which may restore the proper reading frame and eliminate the premature stop codon. Correcting or restoring a mutant gene may also include disrupting an aberrant splice acceptor site or splice donor sequence. Correcting or restoring a mutant gene may also include deleting a non-essential gene segment by the simultaneous action of two nucleases on the same DNA strand in order to restore the proper reading frame by removing the DNA between the two nuclease target sites and repairing the DNA break by NHEJ.

[0055] “Donor DNA”, “donor template,” and “repair template” as used interchangeably herein refers to a double-stranded DNA fragment or molecule that includes at least a portion of the gene of interest. The donor DNA may encode a full-functional protein or a partially functional protein.

[0056] “Duchenne Muscular Dystrophy” or “DMD” as used interchangeably herein refers to a recessive, fatal, X-linked disorder that results in muscle degeneration and eventual death. DMD is a common hereditary monogenic disease and occurs in 1 in 3500 males. DMD is the result of inherited or spontaneous mutations that cause nonsense or frame shift mutations in the dystrophin gene. The majority of dystrophin mutations that cause DMD are deletions of exons that disrupt the reading frame and cause premature translation termination in the dystrophin gene. DMD patients typically lose the ability to physically support themselves during childhood, become progressively weaker during the teenage years, and die in their twenties.

[0057] “Dystrophin” as used herein refers to a rod-shaped cytoplasmic protein which is a part of a protein complex that connects the cytoskeleton of a muscle fiber to the surrounding extracellular matrix through the cell membrane. Dystrophin provides structural stability to the dystroglycan complex of the cell membrane that is responsible for regulating muscle cell integrity and function. The dystrophin gene or “DMD gene” as used interchangeably herein is 2.2 megabases at locus Xp21. The primary transcription measures about 2,400 kb with the mature mRNA being about 14 kb. 79 exons code for the protein which is over 3,500 amino acids.

[0058] “Enhancer” as used herein refers to non-coding DNA sequences containing multiple activator and repressor binding sites. Enhancers range from 200 bp to 1 kb in length and may be either proximal, 5′ upstream to the promoter or within the first intron of the regulated gene, or distal, in introns of neighboring genes or intergenic regions far away from the locus. Through DNA looping, active enhancers contact the promoter dependently of the core DNA binding motif promoter specificity. 4 to 5 enhancers may interact with a promoter. Similarly, enhancers may regulate more than one gene without linkage restriction and may “skip” neighboring genes to regulate more distant ones. Transcriptional regulation may involve elements located in a chromosome different to one where the promoter resides. Proximal enhancers or promoters of neighboring genes may serve as platforms to recruit more distal elements.

[0059] “Frameshift” or “frameshift mutation” as used interchangeably herein refers to a type of gene mutation wherein the addition or deletion of one or more nucleotides causes a shift in the reading frame of the codons in the mRNA. The shift in reading frame may lead to the alteration in the amino acid sequence at protein translation, such as a missense mutation or a premature stop codon.

[0060] “Functional” and “full-functional” as used herein describes protein that has biological activity. A “functional gene” refers to a gene transcribed to mRNA, which is translated to a functional protein.

[0061] “Fusion protein” as used herein refers to a chimeric protein created through the joining of two or more genes that originally coded for separate proteins. The translation of the fusion gene results in a single polypeptide with functional properties derived from each of the original proteins.

[0062] “Genetic construct” as used herein refers to the DNA or RNA molecules that comprise a polynucleotide that encodes a protein. The coding sequence includes initiation and termination signals operably linked to regulatory elements including a promoter and polyadenylation signal capable of directing expression in the cells of the individual to whom the nucleic acid molecule is administered. As used herein, the term “expressible form” refers to gene constructs that contain the necessary regulatory elements operable linked to a coding sequence that encodes a protein such that when present in the cell of the individual, the coding sequence will be expressed. The regulatory elements may include, for example, a promoter, an enhancer, an initiation codon, a stop codon, or a polyadenylation signal

[0063] “Genome editing” or “gene editing” as used herein refers to changing the DNA sequence of a gene. Genome editing may include correcting or restoring a mutant gene or adding additional mutations. Genome editing may include knocking out a gene, such as a mutant gene or a normal gene. Genome editing may be used to treat disease or, for example, enhance muscle repair, by changing the gene of interest. In some embodiments, the compositions and methods detailed herein are for use in somatic cells and not germ line cells.

[0064] The term “heterologous” as used herein refers to nucleic acid comprising two or more subsequences that are not found in the same relationship to each other in nature. For instance, a nucleic acid that is recombinantly produced typically has two or more sequences from unrelated genes synthetically arranged to make a new functional nucleic acid, for example, a promoter from one source and a coding region from another source. The two nucleic acids are thus heterologous to each other in this context. When added to a cell, the recombinant nucleic acids would also be heterologous to the endogenous genes of the cell. Thus, in a chromosome, a heterologous nucleic acid would include a non-native (non-naturally occurring) nucleic acid that has integrated into the chromosome, or a non-native (non-naturally occurring) extrachromosomal nucleic acid. Similarly, a heterologous protein indicates that the protein comprises two or more subsequences that are not found in the same relationship to each other in nature (for example, a “fusion protein,” where the two subsequences are encoded by a single nucleic acid sequence).

[0065] The term “heterozygous” as used herein refers to a subject comprising two different alleles for a particular gene.

[0066] The term “homozygous” as used herein refers to a subject comprising two identical alleles for a particular gene.

[0067] “Homology-directed repair” or “HDR” as used interchangeably herein refers to a mechanism in cells to repair double strand DNA lesions when a homologous piece of DNA is present in the nucleus, mostly in G2 and S phase of the cell cycle. HDR uses a donor DNA template to guide repair and may be used to create specific sequence changes to the genome, including the targeted addition of whole genes. If a donor template is provided along with the CRISPR/Cas9-based gene editing system, then the cellular machinery will repair the break by homologous recombination, which is enhanced several orders of magnitude in the presence of DNA cleavage. When the homologous DNA piece is absent, non-homologous end joining may take place instead.

[0068] “Identical” or “identity” as used herein in the context of two or more polynucleotide or polypeptide sequences means that the sequences have a specified percentage of residues that are the same over a specified region. The percentage may be calculated by optimally aligning the two sequences, comparing the two sequences over the specified region, determining the number of positions at which the identical residue occurs in both sequences to yield the number of matched positions, dividing the number of matched positions by the total number of positions in the specified region, and multiplying the result by 100 to yield the percentage of sequence identity. In cases where the two sequences are of different lengths or the alignment produces one or more staggered ends and the specified region of comparison includes only a single sequence, the residues of single sequence are included in the denominator but not the numerator of the calculation. When comparing DNA and RNA, thymine (T) and uracil (U) may be considered equivalent. Identity may be performed manually or by using a computer sequence algorithm such as BLAST or BLAST 2.0.

[0069] “Junction” as used herein refers to a point in a nucleic acid where one or more nucleic acids are joined. In some embodiments, a junction may be a point in a nucleic acid where an intron is joined to an exon. In some embodiments, a junction may be a point in a nucleic acid where an intron or portion thereof is joined to itself or a different intron or portion thereof. In some embodiments, a junction may be a point in a nucleic acid where double-strand breaks occurred in the nucleic acid.

[0070] “Mutant gene” or “mutated gene” as used interchangeably herein refers to a gene that has undergone a detectable mutation. A mutant gene has undergone a change, such as the loss, gain, or exchange of genetic material, which affects the normal transmission and expression of the gene. A “disrupted gene” as used herein refers to a mutant gene that has a mutation that causes a premature stop codon. The disrupted gene product is truncated relative to a full-length undisrupted gene product.

[0071] “Non-homologous end joining (NHEJ) pathway” as used herein refers to a pathway that repairs double-strand breaks in DNA by directly ligating the break ends without the need for a homologous template. The template-independent re-ligation of DNA ends by NHEJ is a stochastic, error-prone repair process that introduces random micro-insertions and micro-deletions (indels) at the DNA breakpoint. This method may be used to intentionally disrupt, delete, or alter the reading frame of targeted gene sequences. NHEJ typically uses short homologous DNA sequences called microhomologies to guide repair.

[0072] These microhomologies are often present in single-stranded overhangs on the end of double-strand breaks. When the overhangs are perfectly compatible, NHEJ usually repairs the break accurately, yet imprecise repair leading to loss of nucleotides may also occur, but is much more common when the overhangs are not compatible. “Nuclease mediated NHEJ” as used herein refers to NHEJ that is initiated after a nuclease cuts double stranded DNA.

[0073] “Normal gene” as used herein refers to a gene that has not undergone a change, such as a loss, gain, or exchange of genetic material. The normal gene undergoes normal gene transmission and gene expression. For example, a normal gene may be a wild-type gene.

[0074] “Nucleic acid” or “oligonucleotide” or “polynucleotide” as used herein means at least two nucleotides covalently linked together. The depiction of a single strand also defines the sequence of the complementary strand. Thus, a polynucleotide also encompasses the complementary strand of a depicted single strand. Many variants of a polynucleotide may be used for the same purpose as a given polynucleotide. Thus, a polynucleotide also encompasses substantially identical polynucleotides and complements thereof. A single strand provides a probe that may hybridize to a target sequence under stringent hybridization conditions. Thus, a polynudeotide also encompasses a probe that hybridizes under stringent hybridization conditions. Polynucleotides may be single stranded or double stranded or may contain portions of both double stranded and single stranded sequence. The polynucleotide can be nucleic acid, natural or synthetic, DNA, genomic DNA, cDNA, RNA, or a hybrid, where the polynudeotide can contain combinations of deoxyribo- and ribo-nucleotides, and combinations of bases including, for example, uracil, adenine, thymine, cytosine, guanine, inosine, xanthine hypoxanthine, isocytosine, and isoguanine.

[0075] Polynucleotides can be obtained by chemical synthesis methods or by recombinant methods. A genomic nucleic acid can be genomic DNA where it is chromosomal DNA of an organism, the organism includes cell lines commonly used in research such as HEK293T cells.

[0076] “Open reading frame” refers to a stretch of codons that begins with a start codon and ends at a stop codon. In eukaryotic genes with multiple exons, introns are removed, and exons are then joined together after transcription to yield the final mRNA for protein translation. An open reading frame may be a continuous stretch of codons. In some embodiments, the open reading frame only applies to spliced mRNAs, not genomic DNA, for expression of a protein.

[0077] “Operably linked” as used herein means that expression of a gene is under the control of a promoter with which it is spatially connected. A promoter may be positioned 5′ (upstream) or 3′ (downstream) of a gene under its control. The distance between the promoter and a gene may be approximately the same as the distance between that promoter and the gene it controls in the gene from which the promoter is derived. As is known in the art, variation in this distance may be accommodated without loss of promoter function. Nucleic acid or amino acid sequences are “operably linked” (or “operatively linked”) when placed into a functional relationship with one another. For instance, a promoter or enhancer is operably linked to a coding sequence if it regulates, or contributes to the modulation of, the transcription of the coding sequence. Operably linked DNA sequences are typically contiguous, and operably linked amino acid sequences are typically contiguous and in the same reading frame. However, since enhancers generally function when separated from the promoter by up to several kilobases or more and intronic sequences may be of variable lengths, some polynucleotide elements may be operably linked but not contiguous. Similarly, certain amino acid sequences that are non-contiguous in a primary polypeptide sequence may nonetheless be operably linked due to, for example folding of a polypeptide chain. With respect to fusion polypeptides, the terms “operatively linked” and “operably linked” can refer to the fact that each of the components performs the same function in linkage to the other component as it would if it were not so linked.

[0078] “Partially-functional” as used herein describes a protein that is encoded by a mutant gene and has less biological activity than a functional protein but more than a non-functional protein.

[0079] A “peptide” or “polypeptide” is a linked sequence of two or more amino acids linked by peptide bonds. The polypeptide can be natural, synthetic, or a modification or combination of natural and synthetic. Peptides and polypeptides include proteins such as binding proteins, receptors, and antibodies. The terms “polypeptide”, “protein,” and “peptide” are used interchangeably herein. “Primary structure” refers to the amino acid sequence of a particular peptide. “Secondary structure” refers to locally ordered, three dimensional structures within a polypeptide. These structures are commonly known as domains, for example, enzymatic domains, extracellular domains, transmembrane domains, pore domains, and cytoplasmic tail domains. “Domains” are portions of a polypeptide that form a compact unit of the polypeptide and are typically 15 to 350 amino acids long. Exemplary domains include domains with enzymatic activity or ligand binding activity. Typical domains are made up of sections of lesser organization such as stretches of beta-sheet and alpha-helices. “Tertiary structure” refers to the complete three-dimensional structure of a polypeptide monomer. “Quaternary structure” refers to the three-dimensional structure formed by the noncovalent association of independent tertiary units. A “motif” is a portion of a polypeptide sequence and includes at least two amino acids. A motif may be 2 to 20, 2 to 15, or 2 to 10 amino acids in length. In some embodiments, a motif includes 3, 4, 5, 6, or 7 sequential amino acids. A domain may be comprised of a series of the same type of motif.

[0080] “Premature stop codon” or “out-of-frame stop codon” as used interchangeably herein refers to nonsense mutation in a sequence of DNA, which results in a stop codon at location not normally found in the wild-type gene. A premature stop codon may cause a protein to be truncated or shorter compared to the full-length version of the protein.

[0081] “Promoter” as used herein means a synthetic or naturally derived molecule which is capable of conferring, activating or enhancing expression of a nucleic acid in a cell. A promoter may comprise one or more specific transcriptional regulatory sequences to further enhance expression and/or to alter the spatial expression and/or temporal expression of same. A promoter may also comprise distal enhancer or repressor elements, which may be located as much as several thousand base pairs from the start site of transcription. A promoter may be derived from sources including viral, bacterial, fungal, plants, insects, and animals. A promoter may regulate the expression of a gene component constitutively, or differentially with respect to cell, the tissue or organ in which expression occurs or, with respect to the developmental stage at which expression occurs, or in response to external stimuli such as physiological stresses, pathogens, metal ions, or inducing agents. Representative examples of promoters include the bacteriophage T7 promoter, bacteriophage T3 promoter, SP6 promoter, lac operator-promoter, tac promoter, SV40 late promoter, SV40 early promoter, RSV-LTR promoter, CMV IE promoter, SV40 early promoter or SV40 late promoter, human U6 (hU6) promoter, and CMV IE promoter. Promoters that target muscle-specific stem cells may include the CK8 promoter, the Spc5-12 promoter, and the MHCK7 promoter.

[0082] The term “recombinant” when used with reference to, for example, a cell, nucleic acid, protein, or vector, indicates that the cell, nucleic acid, protein, or vector, has been modified by the introduction of a heterologous nucleic acid or protein or the alteration of a native nucleic acid or protein, or that the cell is derived from a cell so modified. Thus, for example, recombinant cells express genes that are not found within the native (naturally occurring) form of the cell or express a second copy of a native gene that is otherwise normally or abnormally expressed, under expressed, or not expressed at all.

[0083] “Sample” or “test sample” as used herein can mean any sample in which the presence and/or level of a target is to be detected or determined or any sample comprising a DNA targeting or gene editing system or component thereof as detailed herein. Samples may include liquids, solutions, emulsions, or suspensions. Samples may include a medical sample. Samples may include any biological fluid or tissue, such as blood, whole blood, fractions of blood such as plasma and serum, muscle, interstitial fluid, sweat, saliva, urine, tears, synovial fluid, bone marrow, cerebrospinal fluid, nasal secretions, sputum, amniotic fluid, bronchoalveolar lavage fluid, gastric lavage, emesis, fecal matter, lung tissue, peripheral blood mononuclear cells, total white blood cells, lymph node cells, spleen cells, tonsil cells, cancer cells, tumor cells, bile, digestive fluid, skin, or combinations thereof. In some embodiments, the sample comprises an aliquot. In other embodiments, the sample comprises a biological fluid. Samples can be obtained by any means known in the art. The sample can be used directly as obtained from a patient or can be pre-treated, such as by filtration, distillation, extraction, concentration, centrifugation, inactivation of interfering components, addition of reagents, and the like, to modify the character of the sample in some manner as discussed herein or otherwise as is known in the art.

[0084] “Skeletal muscle” as used herein refers to a type of striated muscle, which is under the control of the somatic nervous system and attached to bones by bundles of collagen fibers known as tendons. Skeletal muscle is made up of individual components known as myocytes, or “muscle cells”, sometimes colloquially called “muscle fibers.” Myocytes are formed from the fusion of developmental myoblasts (a type of embryonic progenitor cell that gives rise to a muscle cell) in a process known as myogenesis. These long, cylindrical, multinucleated cells are also called myofibers.

[0085] “Skeletal muscle condition” as used herein refers to a condition related to the skeletal muscle, such as muscular dystrophies, aging, muscle degeneration, wound healing, and muscle weakness or atrophy.

[0086] “Subject” and “patient” as used herein interchangeably refers to any vertebrate, including, but not limited to, a mammal that wants or is in need of the herein described compositions or methods. The subject may be a human or a non-human. The subject may be a vertebrate. The subject may be a mammal. The mammal may be a primate or a non-primate. The mammal can be a non-primate such as, for example, cow, pig, camel, llama, hedgehog, anteater, platypus, elephant, alpaca, horse, goat, rabbit, sheep, hamsters, guinea pig, cat, dog, rat, and mouse. The mammal can be a primate such as a human. The mammal can be a non-human primate such as, for example, monkey, cynomolgous monkey, rhesus monkey, chimpanzee, gorilla, orangutan, and gibbon. The subject may be of any age or stage of development, such as, for example, an adult, an adolescent, or an infant. The subject may be male. The subject may be female. In some embodiments, the subject has a specific genetic marker. The subject may be undergoing other forms of treatment.

[0087] “Substantially identical” can mean that a first and second amino acid or polynucleotide sequence are at least 60%, 65%, 70%, 75%, 80%, 85%, 90%, 95%, 96%, 97%, 98%, or 99% over a region of 1, 2, 3, 4, 5, 6, 7, 8, 9, 10, 11, 12, 13, 14, 15, 16, 17, 18, 19, 20, 21, 22, 23, 24, 25, 30, 35, 40, 45, 50, 55, 60, 65, 70, 75, 80, 85, 90, 95, 100, 200, 300, 400, 500, 600, 700, 800, 900, 1000, 1100 amino acids or nucleotides, respectively.

[0088] “Target gene” as used herein refers to any nucleotide sequence encoding a known or putative gene product. The target gene may be a mutated gene involved in a genetic disease. The target gene may encode a known or putative gene product that is intended to be corrected or for which its expression is intended to be modulated. In certain embodiments, the target gene is a gene involved in DMD.

[0089] “Target region” as used herein refers to the region of the target gene to which the CRISPR/Cas9-based gene editing or targeting system is designed to bind.

[0090] “Transgene” as used herein refers to a gene or genetic material containing a gene sequence that has been isolated from one organism and is introduced into a different organism. This non-native segment of DNA may retain the ability to produce RNA or protein in the transgenic organism, or it may alter the normal function of the transgenic organism's genetic code. The introduction of a transgene has the potential to change the phenotype of an organism.

[0091] “Transcriptional regulatory elements” or “regulatory elements” refers to a genetic element which can control the expression of nucleic acid sequences, such as activate, enhancer, or decrease expression, or alter the spatial and/or temporal expression of a nucleic acid sequence. Examples of regulatory elements include, for example, promoters, enhancers, splicing signals, polyadenylation signals, and termination signals. A regulatory element can be “endogenous,” “exogenous,” or “heterologous” with respect to the gene to which it is operably linked. An “endogenous” regulatory element is one which is naturally linked with a given gene in the genome. An “exogenous” or “heterologous” regulatory element is one which is not normally linked with a given gene but is placed in operable linkage with a gene by genetic manipulation.

[0092] “Treatment” or “treating” or “treatment” when referring to protection of a subject from a disease, means suppressing, repressing, reversing, alleviating, ameliorating, or inhibiting the progress of disease, or completely eliminating a disease. A treatment may be either performed in an acute or chronic way. The term also refers to reducing the severity of a disease or symptoms associated with such disease prior to affliction with the disease. Preventing the disease involves administering a composition of the present invention to a subject prior to onset of the disease. Suppressing the disease involves administering a composition of the present invention to a subject after induction of the disease but before its clinical appearance. Repressing or ameliorating the disease involves administering a composition of the present invention to a subject after clinical appearance of the disease. As used herein, the term “gene therapy” refers to a method of treating a patient wherein polypeptides or nucleic acid sequences are transferred into cells of a patient such that activity and/or the expression of a particular gene is modulated. In certain embodiments, the expression of the gene is suppressed. In certain embodiments, the expression of the gene is enhanced. In certain embodiments, the temporal or spatial pattern of the expression of the gene is modulated.

[0093] “Variant” used herein with respect to a polynucleotide means (i) a portion or fragment of a referenced nucleotide sequence; (ii) the complement of a referenced nucleotide sequence or portion thereof; (iii) a nucleic acid that is substantially identical to a referenced nucleic acid or the complement thereof; or (iv) a nucleic acid that hybridizes under stringent conditions to the referenced nucleic acid, complement thereof, or a sequences substantially identical thereto.

[0094] “Variant” with respect to a peptide or polypeptide that differs in amino acid sequence by the insertion, deletion, or conservative substitution of amino acids, but retain at least one biological activity. Variant may also mean a protein with an amino acid sequence that is substantially identical to a referenced protein with an amino acid sequence that retains at least one biological activity. Representative examples of “biological activity” include the ability to be bound by a specific antibody or polypeptide or to promote an immune response. Variant can mean a functional fragment thereof. Variant can also mean multiple copies of a polypeptide. The multiple copies can be in tandem or separated by a linker. A conservative substitution of an amino acid, for example, replacing an amino acid with a different amino acid of similar properties (for example, hydrophilicity, degree and distribution of charged regions) is recognized in the art as typically involving a minor change. These minor changes may be identified, in part, by considering the hydropathic index of amino acids, as understood in the art (Kyte et al., J. Mol. Biol. 1982, 157, 105-132). The hydropathic index of an amino acid is based on a consideration of its hydrophobicity and charge. It is known in the art that amino acids of similar hydropathic indexes may be substituted and still retain protein function. In one aspect, amino acids having hydropathic indexes of ±2 are substituted. The hydrophilicity of amino acids may also be used to reveal substitutions that would result in proteins retaining biological function. A consideration of the hydrophilicity of amino acids in the context of a peptide permits calculation of the greatest local average hydrophilicity of that peptide. Substitutions may be performed with amino acids having hydrophilicity values within ±2 of each other. Both the hydrophobicity index and the hydrophilicity value of amino acids are influenced by the particular side chain of that amino acid. Consistent with that observation, amino acid substitutions that are compatible with biological function are understood to depend on the relative similarity of the amino acids, and particularly the side chains of those amino acids, as revealed by the hydrophobicity, hydrophilicity, charge, size, and other properties.

[0095] “Vector” as used herein means a nucleic acid sequence containing an origin of replication. A vector may be a viral vector, bacteriophage, bacterial artificial chromosome, or yeast artificial chromosome. A vector may be a DNA or RNA vector. A vector may be a self-replicating extrachromosomal vector, and preferably, is a DNA plasmid. For example, the vector may encode a Cas9 protein and at least one gRNA molecule.

[0096] Unless otherwise defined herein, scientific and technical terms used in connection with the present disclosure shall have the meanings that are commonly understood by those of ordinary skill in the art. For example, any nomenclatures used in connection with, and techniques of, cell and tissue culture, molecular biology, immunology, microbiology, genetics, and protein and nucleic acid chemistry and hybridization described herein are those that are well known and commonly used in the art. The meaning and scope of the terms should be clear; in the event however of any latent ambiguity, definitions provided herein take precedent over any dictionary or extrinsic definition. Further, unless otherwise required by context, singular terms shall include pluralities and plural terms shall include the singular.

### 2. Dystrophin Gene

[0097] Dystrophin is a rod-shaped cytoplasmic protein which is a part of a protein complex that connects the cytoskeleton of a muscle fiber to the surrounding extracellular matrix through the cell membrane. Dystrophin provides structural stability to the dystroglycan complex of the cell membrane. The dystrophin gene is 2.2 megabases at locus Xp21. The primary transcription measures about 2,400 kb with the mature mRNA being about 14 kb. 79 exons include approximately 2.2 million nucleotides and code for the protein which is over 3,500 amino acids. Normal skeleton muscle tissue contains only small amounts of dystrophin, but its absence of abnormal expression leads to the development of severe and incurable symptoms. Some mutations in the dystrophin gene lead to the production of defective dystrophin and severe dystrophic phenotype in affected patients. Some mutations in the dystrophin gene lead to partially-functional dystrophin protein and a much milder dystrophic phenotype in affected patients.

[0098] DMD is the result of inherited or spontaneous X-linked recessive mutation(s) that cause nonsense or frame shift mutations in the dystrophin gene. DMD is a severe, highly debilitating and incurable muscle disease. DMD is the most prevalent lethal heritable childhood disease and affects approximately one in 5,000 newborn males. DMD is characterized by muscle deterioration, progressive muscle weakness, often leading to mortality in subjects at age mid-twenties, due to the lack of a functional dystrophin gene, and premature death. Most mutations are deletions in the dystrophin gene that disrupt the reading frame. Naturally occurring mutations and their consequences are relatively well understood for DMD. In-frame deletions that occur in the exon 45-55 regions contained within the rod domain can produce highly functional dystrophin proteins, and many carriers are asymptomatic or display mild symptoms. Exons 45-55 of dystrophin are a mutational hotspot. Furthermore, more than 60% of patients may be treated by targeting exons in this region of the dystrophin gene. Efforts have been made to restore the disrupted dystrophin reading frame in DMD patients by skipping non-essential exon(s) (e.g., exon 45 skipping) during mRNA splicing to produce internally deleted but functional dystrophin proteins. The deletion of internal dystrophin exon(s) (for example, deletion of exon 45) may retain the proper reading frame and can generate an internally truncated but partially functional dystrophin protein. Deletions between exons 45-55 of dystrophin can result in a phenotype that is much milder compared to DMD.

[0099] A dystrophin gene may be a mutant dystrophin gene. A dystrophin gene may be a wild-type dystrophin gene. A dystrophin gene can be a mammal dystrophin gene. In some embodiments, a dystrophin gene is a dog dystrophin gene. In some embodiments, the dystrophin gene is a rat dystrophin gene. In some embodiments, the dystrophin gene is a mouse dystrophin gene. In some embodiments, the dystrophin gene is a human dystrophin gene. A dystrophin gene may have a sequence that is functionally identical to a wild-type dystrophin gene, for example, the sequence may be codon-optimized but still encode for the same protein as the wild-type dystrophin. A mutant dystrophin gene may include one or more mutations relative to the wild-type dystrophin gene. Mutations may include, for example, nucleotide deletions, substitutions, additions, transversions, or combinations thereof. A mutation in the dystrophin gene may be a functional deletion of the dystrophin gene. In some embodiments, the mutation in the dystrophin gene comprises an insertion or deletion in the dystrophin gene that prevents protein expression from the dystrophin gene. Mutations may be in one or more exons and/or introns. Mutations may include deletions of all or parts of at least one intron and/or exon. An exon of a mutant dystrophin gene may be mutated or at least partially deleted from the dystrophin gene. An exon of a mutant dystrophin gene may be fully deleted. A mutant dystrophin gene may have a portion or fragment thereof that corresponds to the corresponding sequence in the wild-type dystrophin gene. In some embodiments, a disrupted dystrophin gene caused by a deleted or mutated exon can be restored in DMD patients by adding back the corresponding wild-type exon. In some embodiments, disrupted dystrophin caused by a deleted or mutated exon 52 can be restored in DMD patients by adding back in wild-type exon 52. In certain embodiments, addition of exon 52 to restore reading frame ameliorates the phenotype in DMD subjects, including DMD subjects with deletion mutations. In certain embodiments, one or more exons may be added and inserted into the disrupted dystrophin gene. The one or more exons may be added and inserted so as to restore the corresponding mutated or deleted exon(s) in dystrophin. The one or more exons may be added and inserted into the disrupted dystrophin gene in addition to adding back and inserting the exon 52. In certain embodiments, exon 52 of a dystrophin gene refers to the 52nd exon of the dystrophin gene. Exon 52 is frequently adjacent to frame-disrupting deletions in DMD patients. The mutation in the mouse dystrophin gene may comprise an insertion or deletion in the mouse dystrophin gene that prevents protein expression from the mouse dystrophin gene. In some embodiments, a disrupted dystrophin gene may be caused by a mutation in exon 23 of the mouse dystrophin gene. In some embodiments, the mutation in the mouse dystrophin gene comprises a premature stop codon in exon 23 of the mouse dystrophin gene. In some embodiments, the mutation in the human dystrophin gene includes deletion of at least one exon. In some embodiments, the mutant human dystrophin gene has exon 52 deleted.

### 3. Utrophin Gene

[0100] Utrophin is a large multidomain protein which is a part of a family of actin-binding proteins that includes dystrophin. Utrophin is a homolog of dystrophin. Utrophin is expressed in developing muscle and is enriched at the neuromuscular junction in mature muscle. Utrophin levels are decreased as the myofibers mature and is replaced by dystrophin. Similar to dystrophin, utrophin interacts with the dystrophin-associated protein complex. The protein complex that connects the cytoskeleton of a muscle fiber to the surrounding extracellular matrix through the cell membrane. The utrophin gene is about 900 kb at locus 6q24.2 in humans and locus 10 A1-A2; 10 3.77 cM in mice (SEQ ID NO: 37). In humans, 85 exons encode for the protein which is 3,433 amino acids. In mice, 81 exons encode for the protein which is 3,430 amino acids (SEQ ID NO: 38). Mature skeletal muscle tissue contains utrophin, but its absence or abnormal expression does not result in any physical or behavioral deficits. Mutations in the utrophin gene lead to the production of defective utrophin and in combination with mutations in the dystrophin gene results in a severe dystrophic phenotype.

[0101] A utrophin gene may be a mutant utrophin gene. A utrophin gene may be a wild-type utrophin gene. A utrophin gene may have a sequence that is functionally identical to a wild-type utrophin gene, for example, the sequence may be codon-optimized but still encode for the same protein as the wild-type utrophin. A mutant utrophin gene may include one or more mutations relative to the wild-type utrophin gene. Mutations may include, for example, nucleotide deletions or truncations, substitutions, additions, transversions, or combinations thereof. A mutation in the mouse utrophin gene may be a functional deletion of the mouse utrophin gene. In some embodiments, the mutation in the mouse utrophin gene comprises an insertion or deletion in the mouse utrophin gene that prevents protein expression from the mouse utrophin gene. For example, the mutation in the mouse utrophin gene may include an insertion in exon 7 of the mouse utrophin gene. Such an insertion in exon 7 may prevent protein expression from the mouse utrophin gene. Mutations may include deletions of all or parts of at least one intron and/or exon. An exon of a mutant utrophin gene may be mutated or at least partially deleted from the utrophin gene. An exon of a mutant utrophin gene may be fully deleted. The mutation in the mouse utrophin gene may be a deletion of the entire mouse utrophin gene. A mutant utrophin gene may have a portion or fragment thereof that corresponds to the corresponding sequence in the wild-type utrophin gene. In some embodiments, disrupted utrophin is caused by an insertion of a neomycin cassette into exon 7 of the mouse utrophin gene. In certain embodiments, one or more exons may be added and inserted into the disrupted utrophin gene.

### 4. Transgenic Mouse

[0102] Previous gene replacement strategies to treat DMD utilizing miniaturized dystrophin transgenes delivered via recombinant adeno-associated viruses (rAAVs) have been successful in ameliorating dystrophic pathology to create a Becker muscular dystrophy (BMD)-like phenotype. Still, accelerated muscle turnover, an immune response to the foreign dystrophin protein, and packaging constraints of rAAVs are significant barriers to achieving maximal therapeutic efficacy for DMD. CRISPR/Cas9 is a promising strategy for genome editing and allows permanent, targeted excision of defective dystrophin exons. CRISPR/Cas9 has been previously used in dystrophic mdx mice via AAV delivery to excise exons and restore the dystrophin reading frame, producing a shorter, yet functional protein. As a result, skeletal muscle pathology and function were improved. In order to test the efficacy of CRISPR-mediated treatment strategies targeting the human dystrophin gene, humanized mouse model, hDMDΔ52/mdx, has previously been generated. These mice contain a deletion of exon 52 in the human dystrophin gene located in chromosome 5 creating an out-of-frame mutation, as well as a point mutation in exon 23 of the mouse dystrophin gene. As a result, these mice are completely dystrophin-null and display mild muscle pathology and respiratory function deficits compared to wild-type mice. While CRISPR treatment in hDMDΔ52/mdx mice can restore the human dystrophin reading frame and allow protein expression, functional improvements are difficult to discern due to their mild pathology and phenotype at baseline. Furthermore, utilizing a mouse model that better reflects the severity of DMD patient symptoms would be highly informative in determining the feasibility of CRISPR-based therapies. There has been a need for a model to effectively recapitulate the human DMD phenotype and to assess and develop future human-targeted therapies for DMD.

[0103] Provided herein is a new transgenic mouse. The genome of the transgenic mouse may include a mutation in the mouse dystrophin gene. For example, the genome of the transgenic mouse may include a premature stop codon in exon 23 of the mouse dystrophin gene. Insertion of a premature stop codon in exon 23 of the mouse dystrophin gene may result in a functional knockout of the mouse dystrophin gene in the mouse. The genome of the transgenic mouse may include a wild-type human dystrophin gene. The genome of the transgenic mouse may include a mutant human dystrophin gene. The mutant human dystrophin gene may be present on chromosome 5 of the mouse. The mutant human dystrophin gene in the genome of the mouse may have an exon deleted, such as, for example, deletion of exon 52.

[0104] The genome of the transgenic mouse may include a mutation in the mouse utrophin gene, as detailed above. For example, the genome of the transgenic mouse may include a full or partial or functional deletion of the mouse utrophin gene. The mouse utrophin gene may be fully, partially, or functionally deleted from chromosome 10 of the mouse. The mouse utrophin gene may comprise a polynucleotide of SEQ ID NO: 37. The mouse utrophin gene may encode a polypeptide comprising and amino acid sequence of SEQ ID NO: 38. The mouse may express a human form of a wild-type or mutant dystrophin gene, but may not express mouse utrophin or mouse dystrophin. In some embodiments, the mouse is heterozygous for the mutation in the mouse utrophin gene. In some embodiments, the mouse is homozygous for the mutation in the mouse utrophin gene. The transgenic mouse may be referred to as hDMDΔ52/mdx/UtrnKO.

[0105] The transgenic mouse may mirror many aspects of the dystrophic phenotype. The transgenic mouse may display a more severe phenotype as compared to a control mouse. In some embodiments, the mouse has reduced life span, reduced body mass, reduced body strength, reduced motor coordination, reduced balance, respiratory defects, skeletal muscle fibrosis, elevated creatine kinase (CK) levels, and/or reduced forelimb strength as compared to a wild-type mouse. In some embodiments, the mouse has reduced life span, reduced body mass, reduced body strength, reduced motor coordination, reduced balance, respiratory defects, skeletal muscle fibrosis, elevated creatine kinase (CK) levels, and/or reduced forelimb strength as compared to a control mouse whose genome comprises a wild-type utrophin gene and a mutation in the mouse dystrophin gene. In some embodiments, the mouse has reduced lifespan, reduced body mass, reduced body strength, reduced motor coordination, reduced balance, and/or reduced forelimb strength as compared to a control mouse whose genome comprises a wild-type utrophin gene, a mutation in the mouse dystrophin gene, and a mutant human dystrophin gene. In some embodiments, the mouse has increased muscle damage as compared to (i) a wild-type mouse, (ii) a control mouse whose genome comprises a wild-type utrophin gene and a mutation in the mouse dystrophin gene, and/or (iii) a control mouse whose genome comprises a wild-type utrophin gene, a mutation in the mouse dystrophin gene, and a mutant human dystrophin gene. Muscle damage may include one or more of degeneration of the muscle, fibrosis of the muscle, and elevated serum creatine kinase. In some embodiments, the mouse does not exhibit detectable dystrophin protein in heart or skeletal muscle.

[0106] Further provided herein is an isolated cell obtained from the mouse, or a progeny cell thereof. The cell may be, for example, a muscle cell, a satellite cell, or an iPSC/iCM. Further provided herein is a gamete produced by the mouse. The gamete may not encode a functional mouse dystrophin protein or a functional mouse utrophin protein. Further provided herein is a primary cell culture or a secondary cell line derived from the mouse, and/or a tissue or organ explant or culture thereof, derived from the mouse.

[0107] As detailed above, the transgenic mouse may be used as a mouse model to better recapitulate the human DMD phenotype. The more severe phenotype of the transgenic mouse may enable the improved detection of functional improvements to the mouse, such as, for example, improvements elicited upon administration of a CRISPR/Cas9-based gene editing system detailed herein. For example, the transgenic mouse may be useful for studying genetic diseases, such as DMD, and altering expression of dystrophin and utrophin using the CRISPR/Cas9-based gene editing systems. The disclosed mouse model can also be used to assess the efficacy of therapeutics using phenotypic measurements such as motor function and lifespan.

### 5. CRISPR/Cas9-Based Gene Editing System

[0108] The compositions and methods detailed herein may be suitable for any gene editing system or tool wherein one or two, or one or more, targeting nucleases are combined to create a deletion in a genome. Gene editing systems may include, for example, those comprising homing endonucleases, zinc finger nucleases (ZFNs), transcription activator-like effector (TALE) nucleases (TALENs), and clustered regularly interspaced short palindromic repeats (CRISPR)-CRISPR-associated protein (Cas protein) such as Cas9. Homing endonucleases generally cleave their DNA substrates as dimers and do not have distinct binding and cleavage domains. ZFNs recognize target sites that consist of two zinc-finger binding sites that flank a 5- to 7-base pair (bp) spacer sequence recognized by the FokI cleavage domain. TALENs recognize target sites that consist of two TALE DNA-binding sites that flank a 12- to 20-bp spacer sequence recognized by the FokI cleavage domain. In some embodiments, the compositions and methods detailed herein may be used with CRISPR/Cas9-based gene editing systems.

[0109] Provided herein are CRISPR/Cas9-based gene editing systems. The CRISPR/Cas9-based gene editing system may be used to delete an exon in the dystrophin gene. In certain embodiments, the CRISPR/Cas9-based gene editing system may be used to delete exon 51 in the human dystrophin gene. The CRISPR/Cas9-based gene editing system may include at least one Cas9 protein or a fusion protein, and at least one gRNA. In some embodiments, the mouse models detailed herein are suitable for use with a CRISPR/Cas9-based gene editing system.

[0110] “Clustered Regularly Interspaced Short Palindromic Repeats” and “CRISPRs”, as used interchangeably herein, refers to loci containing multiple short direct repeats that are found in the genomes of approximately 40% of sequenced bacteria and 90% of sequenced archaea. The CRISPR system is a microbial nuclease system involved in defense against invading phages and plasmids that provides a form of acquired immunity. The CRISPR loci in microbial hosts contain a combination of CRISPR-associated (Cas) genes as well as non-coding RNA elements capable of programming the specificity of the CRISPR-mediated nucleic acid cleavage. Short segments of foreign DNA, called spacers, are incorporated into the genome between CRISPR repeats, and serve as a “memory” of past exposures. Cas9 forms a complex with the 3′ end of the sgRNA (which may be referred interchangeably herein as “gRNA”), and the protein-RNA pair recognizes its genomic target by complementary base pairing between the 5′ end of the sgRNA sequence and a predefined 20 bp DNA sequence, known as the protospacer. This complex is directed to homologous loci of pathogen DNA via regions encoded within the crRNA, i.e., the protospacers, and protospacer-adjacent motifs (PAMs) within the pathogen genome. The non-coding CRISPR array is transcribed and cleaved within direct repeats into short crRNAs containing individual spacer sequences, which direct Cas nucleases to the target site (protospacer). By simply exchanging the 20 bp recognition sequence of the expressed sgRNA, the Cas9 nuclease can be directed to new genomic targets. CRISPR spacers are used to recognize and silence exogenous genetic elements in a manner analogous to RNAi in eukaryotic organisms.

[0111] Three classes of CRISPR systems (Types I, II, and Ill effector systems) are known. The Type II effector system carries out targeted DNA double-strand break in four sequential steps, using a single effector enzyme, Cas9, to cleave dsDNA. Compared to the Type I and Type Ill effector systems, which require multiple distinct effectors acting as a complex, the Type II effector system may function in alternative contexts such as eukaryotic cells. The Type 11 effector system consists of a long pre-crRNA, which is transcribed from the spacer-containing CRISPR locus, the Cas9 protein, and a tracrRNA, which is involved in pre-crRNA processing. The tracrRNAs hybridize to the repeat regions separating the spacers of the pre-crRNA, thus initiating dsRNA cleavage by endogenous RNase Ill. This cleavage is followed by a second cleavage event within each spacer by Cas9, producing mature crRNAs that remain associated with the tracrRNA and Cas9, forming a Cas9:crRNA-tracrRNA complex.

[0112] The Cas9:crRNA-tracrRNA complex unwinds the DNA duplex and searches for sequences matching the crRNA to cleave. Target recognition occurs upon detection of complementarity between a “protospacer” sequence in the target DNA and the remaining spacer sequence in the crRNA. Cas9 mediates cleavage of target DNA if a correct protospacer-adjacent motif (PAM) is also present at the 3′ end of the protospacer. For protospacer targeting, the sequence must be immediately followed by the protospacer-adjacent motif (PAM), a short sequence recognized by the Cas9 nuclease that is required for DNA cleavage. Different Type II systems have differing PAM requirements.

[0113] An engineered form of the Type II effector system of Streptococcus pyogenes was shown to function in human cells for genome engineering. In this system, the Cas9 protein was directed to genomic target sites by a synthetically reconstituted “guide RNA” (“gRNA”, also used interchangeably herein as a chimeric single guide RNA (“sgRNA”)), which is a crRNA-tracrRNA fusion that obviates the need for RNase Ill and crRNA processing in general. Provided herein are CRISPR/Cas9-based engineered systems for use in gene editing and treating genetic diseases. The CRISPR/Cas9-based engineered systems can be designed to target any gene, including genes involved in, for example, a genetic disease, aging, tissue regeneration, or wound healing. The CRISPR/Cas9-based gene editing system can include a Cas9 protein or a Cas9 fusion protein.

[0114] a. Cas9 Protein

[0115] Cas9 protein is an endonuclease that cleaves nucleic acid and is encoded by the CRISPR loci and is involved in the Type II CRISPR system. The Cas9 protein can be from any bacterial or archaea species, including, but not limited to, Streptococcus pyogenes, Staphylococcus aureus (S. aureus), Acidovorax avenae, Actinobacillus pleuropneumoniae, Actinobacillus succinogenes, Actinobacillus suis, Actinomyces sp., Cycliphilus denitrincans, Aminomonas paucivorans, Bacillus cereus, Bacillus smithii, Bacillus thuringiensis, Bacteroides sp., Blastopirellula marina, Bradyrhizobium sp., Brevibacillus laterosporus, Campylobacter coli, Campylobacter jejuni, Campylobacter lari, Candidatus puniceispirillum, Clostridium cellulolyticum, Clostridium perfringens, Corynebacterium accolens, Corynebacterium diphtheria, Corynebacterium matruchotii, Dinoroseobacter shibae, Eubacterium dolichum, Gamma proteobacterium, Gluconacetobacter diazotrophicus, Haemophilus parainfluenzae, Haemophilus sputorum, Helicobacter canadensis, Helicobacter cinaedi, Helicobacter mustelae, Ilyobacter polytropus, Kingella kingae, Lactobacillus crispatus, Listeria ivanovii, Listeria monocytogenes, Listeriaceae bacterium, Methylocystis sp., Methylosinus trichosporium, Mobiluncus mulieris, Neisseria bacilliformis, Neisseria cinerea, Neisseria flavescens, Neisseria lactamica, Neisseria sp., Neisseria wadsworthii, Nitrosomonas sp., Parvibaculum lavamenvorans, Pasteurella multocida, Phascolarctobacterium succinatutens, Ralstonia syzygii, Rhodopseudomonas palustris, Rhodovulum sp., Simonsiella mueller, Sphingomonas sp., Sporolactobacillus vineae, Staphylococcus lugdunensis, Streptococcus sp., Subdoligranulum sp., Tistrella mobilis, Treponema sp., or Verminephrobacter eiseniae. In certain embodiments, the Cas9 molecule is a Streptococcus pyogenes Cas9 molecule (also referred herein as “SpCas9”). SpCas9 may comprise an amino acid sequence of SEQ ID NO: 18. In certain embodiments, the Cas9 molecule is a Staphylococcus aureus Cas9 molecule (also referred herein as “SaCas9”). SaCas9 may comprise an amino acid sequence of SEQ ID NO: 19.

[0116] A Cas9 molecule or a Cas9 fusion protein can interact with one or more gRNA molecule(s) and, in concert with the gRNA molecule(s), can localize to a site which comprises a target domain, and in certain embodiments, a PAM sequence. The Cas9 protein forms a complex with the 3′ end of a gRNA. The ability of a Cas9 molecule or a Cas9 fusion protein to recognize a PAM sequence can be determined, for example, by using a transformation assay as known in the art.

[0117] The specificity of the CRISPR-based system may depend on two factors: the target sequence and the protospacer-adjacent motif (PAM). The target sequence is located on the 5′ end of the gRNA and is designed to bond with base pairs on the host DNA at the correct DNA sequence known as the protospacer. By simply exchanging the recognition sequence of the gRNA, the Cas9 protein can be directed to new genomic targets. The PAM sequence is located on the DNA to be altered and is recognized by a Cas9 protein. PAM recognition sequences of the Cas9 protein can be species specific.

[0118] In certain embodiments, the ability of a Cas9 molecule or a Cas9 fusion protein to interact with and cleave a target nucleic acid is PAM sequence dependent. A PAM sequence is a sequence in the target nucleic acid. In certain embodiments, cleavage of the target nucleic acid occurs upstream from the PAM sequence. Cas9 molecules from different bacterial species can recognize different sequence motifs (for example, PAM sequences). A Cas9 molecule of S. pyogenes may recognize the PAM sequence of NRG (5′-NRG-3′, where R is any nucleotide residue, and in some embodiments, R is either A or G, SEQ ID NO: 1). In certain embodiments, a Cas9 molecule of S. pyogenes may naturally prefer and recognize the sequence motif NGG (SEQ ID NO: 2) and directs cleavage of a target nucleic acid sequence 1 to 10, for example, 3 to 5, bp upstream from that sequence. In some embodiments, a Cas9 molecule of S. pyogenes accepts other PAM sequences, such as NAG (SEQ ID NO: 3) in engineered systems (Hsu et al., Nature Biotechnology 2013 doi:10.1038/nbt.2647). In certain embodiments, a Cas9 molecule of S. thermophilus recognizes the sequence motif NGGNG (SEQ ID NO: 4) and/or NNAGAAW (W=A or T) (SEQ ID NO: 5) and directs cleavage of a target nucleic acid sequence 1 to 10, for example, 3 to 5, bp upstream from these sequences. In certain embodiments, a Cas9 molecule of S. mutans recognizes the sequence motif NGG (SEQ ID NO: 2) and/or NAAR (R=A or G) (SEQ ID NO: 6) and directs cleavage of a target nucleic acid sequence 1 to 10, for example, 3 to 5 bp, upstream from this sequence. In certain embodiments, a Cas9 molecule of S. aureus recognizes the sequence motif NNGRR (R=A or G) (SEQ ID NO: 7) and directs cleavage of a target nucleic acid sequence 1 to 10, for example, 3 to 5, bp upstream from that sequence. In certain embodiments, a Cas9 molecule of S. aureus recognizes the sequence motif NNGRRN (R=A or G) (SEQ ID NO: 8) and directs cleavage of a target nucleic acid sequence 1 to 10, for example, 3 to 5, bp upstream from that sequence. In certain embodiments, a Cas9 molecule of S. aureus recognizes the sequence motif NNGRRT (R=A or G) (SEQ ID NO: 9) and directs cleavage of a target nucleic acid sequence 1 to 10, for example, 3 to 5, bp upstream from that sequence. In certain embodiments, a Cas9 molecule of S. aureus recognizes the sequence motif NNGRRV (R=A or G; V=A or C or G) (SEQ ID NO: 10) and directs cleavage of a target nucleic acid sequence 1 to 10, for example, 3 to 5, bp upstream from that sequence. A Cas9 molecule derived from Neisseria meningitidis (NmCas9) normally has a native PAM of NNNNGATT (SEQ ID NO: 11), but may have activity across a variety of PAMs, including a highly degenerate NNNNGNNN PAM (SEQ ID NO: 12) (Esvelt et al. Nature Methods 2013 doi:10.1038/nmeth.2681). In the aforementioned embodiments, N can be any nucleotide residue, for example, any of A, G, C, or T. Cas9 molecules can be engineered to alter the PAM specificity of the Cas9 molecule.

[0119] In some embodiments, the Cas9 protein recognizes a PAM sequence NGG (SEQ ID NO: 2) or NGA (SEQ ID NO: 13) or NNNRRT (R=A or G) (SEQ ID NO: 14) or ATTCCT (SEQ ID NO: 15) or NGAN (SEQ ID NO: 16) or NGNG (SEQ ID NO: 17). In some embodiments, the Cas9 protein is a Cas9 protein of S. aureus and recognizes the sequence motif NNGRR (R=A or G) (SEQ ID NO: 7), NNGRRN (R=A or G) (SEQ ID NO: 8), NNGRRT (R=A or G) (SEQ ID NO: 9), or NNGRRV (R=A or G) (SEQ ID NO: 10). In the aforementioned embodiments, N can be any nucleotide residue, for example, any of A, G, C, or T.

[0120] Additionally or alternatively, a nucleic acid encoding a Cas9 molecule or Cas9 polypeptide may comprise a nuclear localization sequence (NLS). Nuclear localization sequences are known in the art, for example, SV40 NLS (Pro-Lys-Lys-Lys-Arg-Lys-Val; SEQ ID NO: 39).

[0121] In some embodiments, the at least one Cas9 molecule is a mutant Cas9 molecule. The Cas9 protein can be mutated so that the nuclease activity is inactivated. An inactivated Cas9 protein (“iCas9”, also referred to as “dCas9”) with no endonuclease activity has been targeted to genes in bacteria, yeast, and human cells by gRNAs to silence gene expression through steric hindrance. Exemplary mutations with reference to the S. pyogenes Cas9 sequence to inactivate the nuclease activity include: D10A, E762A, H840A, N854A, N863A and/or D986A. A S. pyogenes Cas9 protein with the D10A mutation may comprise an amino acid sequence of SEQ ID NO: 20. A S. pyogenes Cas9 protein with D10A and H849A mutations may comprise an amino acid sequence of SEQ ID NO: 21. Exemplary mutations with reference to the S. aureus Cas9 sequence to inactivate the nuclease activity include D10A and N580A. In certain embodiments, the mutant S. aureus Cas9 molecule comprises a D10A mutation. The nucleotide sequence encoding this mutant S. aureus Cas9 is set forth in SEQ ID NO: 22. In certain embodiments, the mutant S. aureus Cas9 molecule comprises a N580A mutation. The nucleotide sequence encoding this mutant S. aureus Cas9 molecule is set forth in SEQ ID NO: 23.

[0122] In some embodiments, the Cas9 protein is a VQR variant. The VQR variant of Cas9 is a mutant with a different PAM recognition, as detailed in Kleinstiver, et al. (Nature 2015, 523, 481-485, incorporated herein by reference).

[0123] A polynucleotide encoding a Cas9 molecule can be a synthetic polynucleotide. For example, the synthetic polynucleotide can be chemically modified. The synthetic polynucleotide can be codon optimized, for example, at least one non-common codon or less-common codon has been replaced by a common codon. For example, the synthetic polynucleotide can direct the synthesis of an optimized messenger mRNA, for example, optimized for expression in a mammalian expression system, as described herein. An exemplary codon optimized nucleic acid sequence encoding a Cas9 molecule of S. pyogenes is set forth in SEQ ID NO: 24. Exemplary codon optimized nucleic acid sequences encoding a Cas9 molecule of S. aureus, and optionally containing nuclear localization sequences (NLSs), are set forth in SEQ ID NOs: 25-31. Another exemplary codon optimized nucleic acid sequence encoding a Cas9 molecule of S. aureus comprises the nucleotides 1293-4451 of SEQ ID NO: 32.

[0124] b. Cas9 Fusion Protein

[0125] Alternatively or additionally, the CRISPR/Cas9-based gene editing system can include a fusion protein. The fusion protein can comprise two heterologous polypeptide domains. The first polypeptide domain comprises a Cas9 protein or a mutated Cas9 protein. The first polypeptide domain is fused to at least one second polypeptide domain. The second polypeptide domain has a different activity than what is endogenous to Cas9 protein. For example, the second polypeptide domain may have an activity such as transcription activation activity, transcription repression activity, transcription release factor activity, histone modification activity, nuclease activity, nucleic acid association activity, methylase activity, demethylase activity, acetylation activity, and/or deacetylation activity. The activity of the second polypeptide domain may be direct or indirect. The second polypeptide domain may have this activity itself (direct), or it may recruit and/or interact with a polypeptide domain that has this activity (indirect). In some embodiments, the second polypeptide domain has transcription activation activity. In some embodiments, the second polypeptide domain has transcription repression activity. In some embodiments, the second polypeptide domain comprises a synthetic transcription factor. The second polypeptide domain may be at the C-terminal end of the first polypeptide domain, or at the N-terminal end of the first polypeptide domain, or a combination thereof. The fusion protein may include one second polypeptide domain. The fusion protein may include two of the second polypeptide domains. For example, the fusion protein may include a second polypeptide domain at the N-terminal end of the first polypeptide domain as well as a second polypeptide domain at the C-terminal end of the first polypeptide domain. In other embodiments, the fusion protein may include a single first polypeptide domain and more than one (for example, two or three) second polypeptide domains in tandem.

[0126] The linkage from the first polypeptide domain to the second polypeptide domain can be through reversible or irreversible covalent linkage or through a non-covalent linkage, as long as the linker does not interfere with the function of the second polypeptide domain. For example, a Cas polypeptide can be linked to a second polypeptide domain as part of a fusion protein. As another example, they can be linked through reversible non-covalent interactions such as avidin (or streptavidin)-biotin interaction, histidine-divalent metal ion interaction (such as, Ni, Co, Cu, Fe), interactions between multimerization (such as, dimerization) domains, or glutathione S-transferase (GST)-glutathione interaction. As yet another example, they can be linked covalently but reversibly with linkers such as dibromomaleimide (DBM) or amino-thiol conjugation.

[0127] In some embodiments, the fusion protein includes at least one linker. A linker may be included anywhere in the polypeptide sequence of the fusion protein, for example, between the first and second polypeptide domains. A linker may be of any length and design to promote or restrict the mobility of components in the fusion protein. A linker may comprise any amino acid sequence of about 2 to about 100, about 5 to about 80, about 10 to about 60, or about 20 to about 50 amino acids. A linker may comprise an amino acid sequence of at least about 2, 3, 4, 5, 10, 15, 20, 25, or 30 amino acids. A linker may comprise an amino acid sequence of less than about 100, 90, 80, 70, 60, 50, or 40 amino acids. A linker may include sequential or tandem repeats of an amino acid sequence that is 2 to 20 amino acids in length. Linkers may include, for example, a GS linker (Gly-Gly-Gly-Gly-Ser)n, wherein n is an integer between 0 and 10 (SEQ ID NO: 40). In a GS linker, n can be adjusted to optimize the linker length and achieve appropriate separation of the functional domains. Other examples of linkers may include, for example, Gly-Gly-Gly-Gly-Gly (SEQ ID NO: 41), Gly-Gly-Ala-Gly-Gly (SEQ ID NO: 42), Gly/Ser rich linkers such as Gly-Gly-Gly-Gly-Ser-Ser-Ser (SEQ ID NO: 43), or Gly/Ala rich linkers such as Gly-Gly-Gly-Gly-Ala-Ala-Ala (SEQ ID NO: 44).

[0128] i) Transcription Activation Activity

[0129] The second polypeptide domain can have transcription activation activity, for example, a transactivation domain. For example, gene expression of endogenous mammalian genes, such as human genes, can be achieved by targeting a fusion protein of a first polypeptide domain, such as dCas9, and a transactivation domain to mammalian promoters via combinations of gRNAs. The transactivation domain can include a VP16 protein, multiple VP16 proteins, such as a VP48 domain or VP64 domain, p65 domain of NF kappa B transcription activator activity, TET1, VPR, VPH, Rta, and/or p300. For example, the fusion protein may comprise dCas9-p300. In some embodiments, p300 comprises a polypeptide having the amino acid sequence of SEQ ID NO: 33 or SEQ ID NO: 34. In other embodiments, the fusion protein comprises dCas9-VP64. In other embodiments, the fusion protein comprises VP64-dCas9-VP64. VP64-dCas9-VP64 may comprise a polypeptide having the amino acid sequence of SEQ ID NO: 35, encoded by the polynucleotide of SEQ ID NO: 36.

[0130] ii) Transcription Repression Activity

[0131] The second polypeptide domain can have transcription repression activity. Non-limiting examples of repressors include Kruppel associated box activity such as a KRAB domain or KRAB, MECP2, EED, ERF repressor domain (ERD), Mad mSIN3 interaction domain (SID) or Mad-SID repressor domain, SID4X repressor domain, Mxil repressor domain, SUV39H1, SUV39H2, G9A, ESET/SETBD1, Cir4, Su(var)3-9, Pr-SET7/8, SUV4-20H1, PR-set7, Suv4-20, Set9, EZH2, RIZ1, JMJD2A/JHDM3A, JMJD2B, JMJ2D2C/GASC1, JMJD2D, Rph1, JARID1A/RBP2, JARID1B/PLU-1, JARID1C/SMCX, JARID1D/SMCY, Lid, Jhn2, Jmj2, HDAC1, HDAC2, HDAC3, HDAC8, Rpd3, Hos1, Cir6, HDAC4, HDAC5, HDAC7, HDAC9, Hda1, Cir3, SIRT1, SIRT2, Sir2, Hst1, Hst2, Hst3, Hst4, HDAC11, DNMT1, DNMT3a/3b, DNMT3A-3L, MET1, DRM3, ZMET2, CMT1, CMT2, Laminin A, Laminin B, CTCF, and/or a domain having TATA box binding protein activity, or a combination thereof. In some embodiments, the second polypeptide domain has a KRAB domain activity, ERF repressor domain activity, Mxil repressor domain activity, SID4X repressor domain activity, Mad-SID repressor domain activity, DNMT3A or DNMT3L or fusion thereof activity, LSD1 histone demethylase activity, or TATA box binding protein activity. In some embodiments, the polypeptide domain comprises KRAB. For example, the fusion protein may be S. pyogenes dCas9-KRAB (polynucleotide sequence SEQ ID NO: 45; protein sequence SEQ ID NO: 46). The fusion protein may be S. aureus dCas9-KRAB (polynucleotide sequence SEQ ID NO: 47; protein sequence SEQ ID NO: 48).

[0132] iii) Transcription Release Factor Activity

[0133] The second polypeptide domain can have transcription release factor activity. The second polypeptide domain can have eukaryotic release factor 1 (ERF1) activity or eukaryotic release factor 3 (ERF3) activity.

[0134] iv) Histone Modification Activity

[0135] The second polypeptide domain can have histone modification activity. The second polypeptide domain can have histone deacetylase, histone acetyltransferase, histone demethylase, or histone methyltransferase activity. The histone acetyltransferase may be p300 or CREB-binding protein (CBP) protein, or fragments thereof. For example, the fusion protein may be dCas9-p300. In some embodiments, p300 comprises a polypeptide of SEQ ID NO: 33 or SEQ ID NO: 34.

[0136] v) Nuclease Activity

[0137] The second polypeptide domain can have nuclease activity that is different from the nuclease activity of the Cas9 protein. A nuclease, or a protein having nuclease activity, is an enzyme capable of cleaving the phosphodiester bonds between the nucleotide subunits of nucleic acids. Nucleases are usually further divided into endonucleases and exonucleases, although some of the enzymes may fall in both categories. Well known nucleases include deoxyribonuclease and ribonuclease.

[0138] vi) Nucleic Acid Association Activity

[0139] The second polypeptide domain can have nucleic acid association activity or nucleic acid binding protein-DNA-binding domain (DBD). A DBD is an independently folded protein domain that contains at least one motif that recognizes double- or single-stranded DNA. A DBD can recognize a specific DNA sequence (a recognition sequence) or have a general affinity to DNA. A nucleic acid association region may be selected from helix-turn-helix region, leucine zipper region, winged helix region, winged helix-turn-helix region, helix-loop-helix region, immunoglobulin fold, B3 domain, Zinc finger, HMG-box, Wor3 domain, and TAL effector DNA-binding domain.

[0140] vii) Methylase Activity

[0141] The second polypeptide domain can have methylase activity, which involves transferring a methyl group to DNA, RNA, protein, small molecule, cytosine, or adenine. In some embodiments, the second polypeptide domain includes a DNA methyltransferase.

[0142] viii) Demethylase Activity

[0143] The second polypeptide domain can have demethylase activity. The second polypeptide domain can include an enzyme that removes methyl (CH3-) groups from nucleic acids, proteins (in particular histones), and other molecules. Alternatively, the second polypeptide can convert the methyl group to hydroxymethylcytosine in a mechanism for demethylating DNA. The second polypeptide can catalyze this reaction. For example, the second polypeptide that catalyzes this reaction can be Tet1, also known as Tet1CD (Ten-eleven translocation methylcytosine dioxygenase 1; polynucleotide sequence SEQ ID NO: 49; amino acid sequence SEQ ID NO: 50). In some embodiments, the second polypeptide domain has histone demethylase activity. In some embodiments, the second polypeptide domain has DNA demethylase activity.

[0144] c. Guide RNA (gRNA)

[0145] The CRISPR/Cas-based gene editing system includes at least one gRNA molecule. For example, the CRISPR/Cas-based gene editing system may include two gRNA molecules. The at least one gRNA molecule can bind and recognize a target region. The gRNA provides the targeting of a CRISPR/Cas9-based gene editing system. The gRNA is a fusion of two noncoding RNAs: a crRNA and a tracrRNA. gRNA mimics the naturally occurring crRNA:tracrRNA duplex involved in the Type II Effector system. This duplex, which may include, for example, a 42-nucleotide crRNA and a 75-nucleotide tracrRNA, acts as a guide for the Cas9 to bind, and in some cases, cleave the target nucleic acid. The gRNA may target any desired DNA sequence by exchanging the sequence encoding a 20 bp protospacer which confers targeting specificity through complementary base pairing with the desired DNA target. The “target region” or “target sequence” or “protospacer” refers to the region of the target gene to which the CRISPR/Cas9-based gene editing system targets and binds. The portion of the gRNA that targets the target sequence in the genome may be referred to as the “targeting sequence” or “targeting portion” or “targeting domain.” “Protospacer” or “gRNA spacer” may refer to the region of the target gene to which the CRISPR/Cas9-based gene editing system targets and binds; “protospacer” or “gRNA spacer” may also refer to the portion of the gRNA that is complementary to the targeted sequence in the genome. The gRNA may include a gRNA scaffold. A gRNA scaffold facilitates Cas9 binding to the gRNA and may facilitate endonuclease activity. The gRNA scaffold is a polynucleotide sequence that follows the portion of the gRNA corresponding to sequence that the gRNA targets. Together, the gRNA targeting portion and gRNA scaffold form one polynucleotide. The constant region of the gRNA may include the sequence of SEQ ID NO: 52 (RNA), which is encoded by a sequence comprising SEQ ID NO: 51 (DNA). The CRISPR/Cas9-based gene editing system may include at least one gRNA, wherein the gRNAs target different DNA sequences. The target DNA sequences may be overlapping. The gRNA may comprise at its 5′ end the targeting domain that is sufficiently complementary to the target region to be able to hybridize to, for example, about 10 to about 20 nucleotides of the target region of the target gene, when it is followed by an appropriate Protospacer Adjacent Motif (PAM). The target sequence or protospacer is followed by a PAM sequence at the 3′ end of the protospacer in the genome. Different Type II systems have differing PAM requirements, as detailed above.

[0146] The targeting domain of the gRNA does not need to be perfectly complementary to the target region of the target DNA. In some embodiments, the targeting domain of the gRNA is at least 80%, 85%, 90%, 95%, 96%, 97%, 98%, or at least 99% complementary to (or has 1, 2 or 3 mismatches compared to) the target region over a length of, such as, 10, 11, 12, 13, 14, 15, 16, 17, 18, 19, or 20 nucleotides. For example, the DNA-targeting domain of the gRNA may be at least 80% complementary over at least 18 nucleotides of the target region. The target region may be on either strand of the target DNA.

[0147] As described above, the gRNA molecule comprises a targeting domain (also referred to as targeted or targeting sequence), which is a polynucleotide sequence complementary to the target DNA sequence. The gRNA may comprise a “G” at the 5′ end of the targeting domain or complementary polynucleotide sequence. The targeting domain of a gRNA molecule may comprise at least a 10 base pair, at least a 11 base pair, at least a 12 base pair, at least a 13 base pair, at least a 14 base pair, at least a 15 base pair, at least a 16 base pair, at least a 17 base pair, at least a 18 base pair, at least a 19 base pair, at least a 20 base pair, at least a 21 base pair, at least a 22 base pair, at least a 23 base pair, at least a 24 base pair, at least a 25 base pair, at least a 30 base pair, or at least a 35 base pair complementary polynucleotide sequence of the target DNA sequence followed by a PAM sequence. In certain embodiments, the targeting domain of a gRNA molecule has 19-25 nucleotides in length. In certain embodiments, the targeting domain of a gRNA molecule is 20 nucleotides in length. In certain embodiments, the targeting domain of a gRNA molecule is 21 nucleotides in length. In certain embodiments, the targeting domain of a gRNA molecule is 22 nucleotides in length. In certain embodiments, the targeting domain of a gRNA molecule is 23 nucleotides in length.

[0148] The gRNA may target a region near exon 51 of the human dystrophin gene. The gRNA may target a region within intron 50 of the human dystrophin gene. The gRNA may target a region within intron 51 of the human dystrophin gene. The gRNA may bind and target and/or hybridize to a polynucleotide sequence comprising at least one of SEQ ID NOs: 55-78, or a complement thereof, or a variant thereof, or a truncation thereof. The gRNA may be encoded by a polynucleotide sequence comprising at least one of SEQ ID NOs: 55-78, or a complement thereof, or a variant thereof, or a truncation thereof. The gRNA may comprise a polynucleotide sequence of at least one of SEQ ID NOs: 79-102, or a complement thereof, or a variant thereof, or a truncation thereof. A truncation may be 1, 2, 3, 4, 5, 6, 7, 8, or 9 nucleotides shorter than the reference sequence. A truncation may be 1, 2, 3, 4, 5, 6, 7, 8, or 9 nucleotides shorter than the sequence of any one of SEQ ID NOs: 55-78. A truncation may be 1, 2, 3, 4, 5, 6, 7, 8, or 9 nucleotides shorter than the sequence of SEQ ID NO: 55. A truncation may be 1, 2, 3, 4, 5, 6, 7, 8, or 9 nucleotides shorter than the sequence of SEQ ID NO: 56. A truncation may be 1, 2, 3, 4, 5, 6, 7, 8, or 9 nucleotides shorter than the sequence of SEQ ID NO: 57. A truncation may be 1, 2, 3, 4, 5, 6, 7, 8, or 9 nucleotides shorter than the sequence of SEQ ID NO: 58. A truncation may be 1, 2, 3, 4, 5, 6, 7, 8, or 9 nucleotides shorter than the sequence of SEQ ID NO: 59. A truncation may be 1, 2, 3, 4, 5, 6, 7, 8, or 9 nucleotides shorter than the sequence of SEQ ID NO: 60. A truncation may be 1, 2, 3, 4, 5, 6, 7, 8, or 9 nucleotides shorter than the sequence of SEQ ID NO: 61. A truncation may be 1, 2, 3, 4, 5, 6, 7, 8, or 9 nucleotides shorter than the sequence of SEQ ID NO: 62. A truncation may be 1, 2, 3, 4, 5, 6, 7, 8, or 9 nucleotides shorter than the sequence of SEQ ID NO: 63. A truncation may be 1, 2, 3, 4, 5, 6, 7, 8, or 9 nucleotides shorter than the sequence of SEQ ID NO: 64. A truncation may be 1, 2, 3, 4, 5, 6, 7, 8, or 9 nucleotides shorter than the sequence of SEQ ID NO: 65. A truncation may be 1, 2, 3, 4, 5, 6, 7, 8, or 9 nucleotides shorter than the sequence of SEQ ID NO: 66. A truncation may be 1, 2, 3, 4, 5, 6, 7, 8, or 9 nucleotides shorter than the sequence of SEQ ID NO: 67. A truncation may be 1, 2, 3, 4, 5, 6, 7, 8, or 9 nucleotides shorter than the sequence of SEQ ID NO: 68. A truncation may be 1, 2, 3, 4, 5, 6, 7, 8, or 9 nucleotides shorter than the sequence of SEQ ID NO: 69. A truncation may be 1, 2, 3, 4, 5, 6, 7, 8, or 9 nucleotides shorter than the sequence of SEQ ID NO: 70. A truncation may be 1, 2, 3, 4, 5, 6, 7, 8, or 9 nucleotides shorter than the sequence of SEQ ID NO: 71. A truncation may be 1, 2, 3, 4, 5, 6, 7, 8, or 9 nucleotides shorter than the sequence of SEQ ID NO: 72. A truncation may be 1, 2, 3, 4, 5, 6, 7, 8, or 9 nucleotides shorter than the sequence of SEQ ID NO: 73. A truncation may be 1, 2, 3, 4, 5, 6, 7, 8, or 9 nucleotides shorter than the sequence of SEQ ID NO: 74. A truncation may be 1, 2, 3, 4, 5, 6, 7, 8, or 9 nucleotides shorter than the sequence of SEQ ID NO: 75. A truncation may be 1, 2, 3, 4, 5, 6, 7, 8, or 9 nucleotides shorter than the sequence of SEQ ID NO: 76. A truncation may be 1, 2, 3, 4, 5, 6, 7, 8, or 9 nucleotides shorter than the sequence of SEQ ID NO: 77. A truncation may be 1, 2, 3, 4, 5, 6, 7, 8, or 9 nucleotides shorter than the sequence of SEQ ID NO: 78. A truncation may be 1, 2, 3, 4, 5, 6, 7, 8, or 9 nucleotides shorter than any of the sequences of SEQ ID NOs: 79-102.

[0149] In some embodiments, the gRNA may be encoded by or bind and target and/or hybridize to a polynucleotide sequence comprising SEQ ID NO: 53 or SEQ ID NO: 54 or a complement thereof, or a variant thereof, or a truncation thereof. In some embodiments, the gRNA comprises a polynucleotide sequence selected from SEQ ID NO: 103 and SEQ ID NO: 104 or a complement thereof, or a variant thereof, or a truncation thereof.

[0150] The number of gRNA molecules that may be included in the CRISPR/Cas9-based gene editing system can be at least 1 gRNA, at least 2 different gRNAs, at least 3 different gRNAs, at least 4 different gRNAs, at least 5 different gRNAs, at least 6 different gRNAs, at least 7 different gRNAs, at least 8 different gRNAs, at least 9 different gRNAs, at least 10 different gRNAs, at least 11 different gRNAs, at least 12 different gRNAs, at least 13 different gRNAs, at least 14 different gRNAs, at least 15 different gRNAs, at least 16 different gRNAs, at least 17 different gRNAs, at least 18 different gRNAs, at least 18 different gRNAs, at least 20 different gRNAs, at least 25 different gRNAs, at least 30 different gRNAs, at least 35 different gRNAs, at least 40 different gRNAs, at least 45 different gRNAs, or at least 50 different gRNAs. The number of gRNA molecules that may be included in the CRISPR/Cas9-based gene editing system can be less than 50 different gRNAs, less than 45 different gRNAs, less than 40 different gRNAs, less than 35 different gRNAs, less than 30 different gRNAs, less than 25 different gRNAs, less than 20 different gRNAs, less than 19 different gRNAs, less than 18 different gRNAs, less than 17 different gRNAs, less than 16 different gRNAs, less than 15 different gRNAs, less than 14 different gRNAs, less than 13 different gRNAs, less than 12 different gRNAs, less than 11 different gRNAs, less than 10 different gRNAs, less than 9 different gRNAs, less than 8 different gRNAs, less than 7 different gRNAs, less than 6 different gRNAs, less than 5 different gRNAs, less than 4 different gRNAs, less than 3 different gRNAs, or less than 2 different gRNAs. The number of gRNAs that may be included in the CRISPR/Cas9-based gene editing system can be between at least 1 gRNA to at least 50 different gRNAs, at least 1 gRNA to at least 45 different gRNAs, at least 1 gRNA to at least 40 different gRNAs, at least 1 gRNA to at least 35 different gRNAs, at least 1 gRNA to at least 30 different gRNAs, at least 1 gRNA to at least 25 different gRNAs, at least 1 gRNA to at least 20 different gRNAs, at least 1 gRNA to at least 16 different gRNAs, at least 1 gRNA to at least 12 different gRNAs, at least 1 gRNA to at least 8 different gRNAs, at least 1 gRNA to at least 4 different gRNAs, at least 4 gRNAs to at least 50 different gRNAs, at least 4 different gRNAs to at least 45 different gRNAs, at least 4 different gRNAs to at least 40 different gRNAs, at least 4 different gRNAs to at least 35 different gRNAs, at least 4 different gRNAs to at least 30 different gRNAs, at least 4 different gRNAs to at least 25 different gRNAs, at least 4 different gRNAs to at least 20 different gRNAs, at least 4 different gRNAs to at least 16 different gRNAs, at least 4 different gRNAs to at least 12 different gRNAs, at least 4 different gRNAs to at least 8 different gRNAs, at least 8 different gRNAs to at least 50 different gRNAs, at least 8 different gRNAs to at least 45 different gRNAs, at least 8 different gRNAs to at least 40 different gRNAs, at least 8 different gRNAs to at least 35 different gRNAs, 8 different gRNAs to at least 30 different gRNAs, at least 8 different gRNAs to at least 25 different gRNAs, 8 different gRNAs to at least 20 different gRNAs, at least 8 different gRNAs to at least 16 different gRNAs, or 8 different gRNAs to at least 12 different gRNAs.

[0151] d. Donor Sequence

[0152] The CRISPR/Cas9-based gene editing system may include at least one donor sequence. A donor sequence comprises a polynucleotide sequence to be inserted into a genome. A donor sequence may comprise a wild-type sequence of a gene.

[0153] The gRNA and donor sequence may be present in a variety of molar ratios. The molar ratio between the gRNA and donor sequence may be 1:1, or 1:15, or from 5:1 to 1:10, or from 1:1 to 1:5. The molar ratio between the gRNA and donor sequence may be at least 1:1, at least 1:2, at least 1:3, at least 1:4, at least 1:5, at least 1:6, at least 1:7, at least 1:8, at least 1:9, at least 1:10, at least 1:15, or at least 1:20. The molar ratio between the gRNA and donor sequence may be less than 20:1, less than 15:1, less than 10:1, less than 9:1, less than 8:1, less than 7:1, less than 6:1, less than 5:1, less than 4:1, less than 3:1, less than 2:1, or less than 1:1.

[0154] e. Repair Pathways

[0155] The CRISPR/Cas9-based gene editing system may be used to introduce site-specific double strand breaks at targeted genomic loci, such as the dystrophin gene, the utrophin gene, or the dystrophin gene within the Xp21 locus. Site-specific double-strand breaks are created when the CRISPR/Cas9-based gene editing system binds to a target DNA sequence, thereby permitting cleavage of the target DNA. This DNA cleavage may stimulate the natural DNA-repair machinery, leading to one of two possible repair pathways: homology-directed repair (HDR) or the non-homologous end joining (NHEJ) pathway.

[0156] i) Homology-Directed Repair (HDR)

[0157] Restoration of protein expression from a gene may involve homology-directed repair (HDR). A donor template may be administered to a cell. The donor template may include a nucleotide sequence encoding a full-functional protein or a partially functional protein. In such embodiments, the donor template may include fully functional gene construct for restoring a mutant gene, or a fragment of the gene that after homology-directed repair, leads to restoration of the mutant gene. In other embodiments, the donor template may include a nucleotide sequence encoding a mutated version of an inhibitory regulatory element of a gene. Mutations may include, for example, nucleotide substitutions, insertions, deletions, or a combination thereof. In such embodiments, introduced mutation(s) into the inhibitory regulatory element of the gene may reduce the transcription of or binding to the inhibitory regulatory element.

[0158] ii) NHEJ

[0159] Restoration of protein expression from gene may be through template-free NHEJ-mediated DNA repair. In certain embodiments, NHEJ is a nuclease mediated NHEJ, which in certain embodiments, refers to NHEJ that is initiated a Cas9 molecule that cuts double stranded DNA. The method comprises administering a presently disclosed CRISPR/Cas9-based gene editing system or a composition comprising thereof to a subject for gene editing.

[0160] Nuclease mediated NHEJ may correct a mutated target gene and offer several potential advantages over the HDR pathway. For example, NHEJ does not require a donor template, which may cause nonspecific insertional mutagenesis. In contrast to HDR, NHEJ operates efficiently in all stages of the cell cycle and therefore may be effectively exploited in both cycling and post-mitotic cells, such as muscle fibers. This provides a robust, permanent gene restoration alternative to oligonucleotide-based exon skipping or pharmacologic forced read-through of stop codons and could theoretically require as few as one drug treatment.

### 6. Genetic Constructs

[0161] The CRISPR/Cas9-based gene editing system may be encoded by or comprised within a genetic construct. The genetic construct, such as a plasmid or expression vector, may comprise a nucleic acid that encodes the CRISPR/Cas9-based gene editing system and/or at least one of the gRNAs. In certain embodiments, a genetic construct encodes one gRNA molecule, i.e., a first gRNA molecule, and optionally a Cas9 molecule or fusion protein. In some embodiments, a genetic construct encodes two gRNA molecules, i.e., a first gRNA molecule and a second gRNA molecule, and optionally two Cas9 molecules or fusion proteins, e.g. a first Cas9 molecule and a second Cas9 molecule. In some embodiments, a genetic construct encodes two gRNA molecules, i.e., a first gRNA molecule and a second gRNA molecule, and optionally a Cas9 molecule or fusion protein. In some embodiments, a first genetic construct encodes one gRNA molecule, i.e., a first gRNA molecule, and optionally a Cas9 molecule or fusion protein, and a second genetic construct encodes one gRNA molecule, i.e., a second gRNA molecule, and optionally a Cas9 molecule or fusion protein.

[0162] Genetic constructs may include polynucleotides such as vectors and plasmids. Genetic constructs may include transposons. For example, the genetic construct may be a transposon encoding a Cas9 molecule or fusion protein and/or at least one gRNA molecule. The transposon may be stably integrated into the genome of a subject. The transposon may be co-administered with a transposase or a polynucleotide encoding the transposase. Transposon systems known in the art may include, for example, piggybac or sleeping beauty systems. The genetic construct may be a linear minichromosome including centromere, telomeres, or plasmids or cosmids. The vector may be an expression vectors or system to produce protein by routine techniques and readily available starting materials including Sambrook et al., Molecular Cloning and Laboratory Manual, Second Ed., Cold Spring Harbor (1989), which is incorporated fully by reference. The construct may be recombinant. The genetic construct may be part of a genome of a recombinant viral vector, including recombinant lentivirus, recombinant adenovirus, and recombinant adenovirus associated virus. The genetic construct may comprise regulatory elements for gene expression of the coding sequences of the nucleic acid. The regulatory elements may be a promoter, an enhancer, an initiation codon, a stop codon, or a polyadenylation signal.

[0163] The genetic construct may comprise heterologous nucleic acid encoding the CRISPR/Cas-based gene editing system and may further comprise an initiation codon, which may be upstream of the CRISPR/Cas-based gene editing system coding sequence, and a stop codon, which may be downstream of the CRISPR/Cas-based gene editing system coding sequence. The initiation and termination codon may be in frame with the CRISPR/Cas-based gene editing system coding sequence.

[0164] The genetic construct may also comprise a promoter that is operably linked to the CRISPR/Cas-based gene editing system coding sequence. In some embodiments, the promoter is operably linked to a polynucleotide encoding a gRNA and a Cas9 scaffold. The promoter may be a constitutive promoter, an inducible promoter, a repressible promoter, or a regulatable promoter. The promoter may be a ubiquitous promoter. The promoter may be a tissue-specific promoter. The tissue specific promoter may be a muscle specific promoter. The tissue specific promoter may be a skin specific promoter. The CRISPR/Cas-based gene editing system may be under the light-inducible or chemically inducible control to enable the dynamic control of gene/genome editing in space and time. The promoter operably linked to the CRISPR/Cas-based gene editing system coding sequence may be a promoter from simian virus 40 (SV40), a mouse mammary tumor virus (MMTV) promoter, a human immunodeficiency virus (HIV) promoter such as the bovine immunodeficiency virus (BIV) long terminal repeat (LTR) promoter, a Moloney virus promoter, an avian leukosis virus (ALV) promoter, a cytomegalovirus (CMV) promoter such as the CMV immediate early promoter, Epstein Barr virus (EBV) promoter, or a Rous sarcoma virus (RSV) promoter. The promoter may also be a promoter from a human gene such as human ubiquitin C (hUbC), human actin, human myosin, human hemoglobin, human muscle creatine, or human metalothionein. Examples of a tissue specific promoter, such as a muscle or skin specific promoter, natural or synthetic, are described in U.S. Patent Application Publication No. US20040175727, the contents of which are incorporated herein in its entirety. The promoter may be a CK8 promoter, a Spc512 promoter, a MHCK7 promoter, for example.

[0165] The genetic construct may also comprise a polyadenylation signal, which may be downstream of the CRISPR/Cas-based gene editing system. The polyadenylation signal may be a SV40 polyadenylation signal, LTR polyadenylation signal, bovine growth hormone (bGH) polyadenylation signal, human growth hormone (hGH) polyadenylation signal, or human 1-globin polyadenylation signal. The SV40 polyadenylation signal may be a polyadenylation signal from a pCEP4 vector (Invitrogen, San Diego, CA).

[0166] Coding sequences in the genetic construct may be optimized for stability and high levels of expression. In some instances, codons are selected to reduce secondary structure formation of the RNA such as that formed due to intramolecular bonding.

[0167] The genetic construct may also comprise an enhancer upstream of the CRISPR/Cas-based gene editing system or gRNAs. The enhancer may be necessary for DNA expression. The enhancer may be human actin, human myosin, human hemoglobin, human muscle creatine or a viral enhancer such as one from CMV, HA, RSV, or EBV. Polynucleotide function enhancers are described in U.S. Pat. Nos. 5,593,972, 5,962,428, and WO94/016737, the contents of each are fully incorporated by reference. The genetic construct may also comprise a mammalian origin of replication in order to maintain the vector extrachromosomally and produce multiple copies of the vector in a cell. The genetic construct may also comprise a regulatory sequence, which may be well suited for gene expression in a mammalian or human cell into which the vector is administered. The genetic construct may also comprise a reporter gene, such as green fluorescent protein (“GFP”) and/or a selectable marker, such as hygromycin (“Hygro”) or puromycin (“Puro”).

[0168] The genetic construct may be useful for transfecting cells with nucleic acid encoding the CRISPR/Cas-based gene editing system, which the transformed host cell is cultured and maintained under conditions wherein expression of the CRISPR/Cas-based gene editing system takes place. The genetic construct may be transformed or transduced into a cell. The genetic construct may be formulated into any suitable type of delivery vehicle including, for example, a viral vector, lentiviral expression, mRNA electroporation, and lipid-mediated transfection for delivery into a cell. The genetic construct may be part of the genetic material in attenuated live microorganisms or recombinant microbial vectors which live in cells. The genetic construct may be present in the cell as a functioning extrachromosomal molecule.

[0169] Further provided herein is a cell transformed or transduced with a system or component thereof as detailed herein. Suitable cell types are detailed herein. In some embodiments, the cell is a stem cell. The stem cell may be a human stem cell. In some embodiments, the cell is an embryonic stem cell. The stem cell may be a human pluripotent stem cell (iPSCs). Further provided are stem cell-derived neurons, such as neurons derived from iPSCs transformed or transduced with a DNA targeting system or component thereof as detailed herein.

[0170] a. Viral Vectors

[0171] A genetic construct may be a viral vector. Further provided herein is a viral delivery system. Viral delivery systems may include, for example, lentivirus, retrovirus, adenovirus, mRNA electroporation, or nanoparticles. In some embodiments, the vector is a modified lentiviral vector. In some embodiments, the viral vector is an adeno-associated virus (AAV) vector. The AAV vector is a small virus belonging to the genus Dependovirus of the Parvoviridae family that infects humans and some other primate species. In some embodiments, the viral vector is a lentiviral vector. The lentivirus is a genus belonging to the Retroviridae family that infects humans and other mammals.

[0172] AAV vectors or lentiviral vectors may be used to deliver CRISPR/Cas9-based gene editing systems using various construct configurations. For example, AAV vectors or lentiviral vectors may deliver Cas9 or fusion protein and gRNA expression cassettes on separate vectors or on the same vector. Alternatively, if the small Cas9 proteins or fusion proteins, derived from species such as Staphylococcus aureus or Neisseria meningitidis, are used then both the Cas9 and up to two gRNA expression cassettes may be combined in a single AAV vector or lentiviral vector. In some embodiments, the AAV vector has a 4.7 kb packaging limit. In some embodiments, the lentiviral vector has a 9.7 kb packaging limit.

[0173] In some embodiments, the AAV vector is a modified AAV vector. The modified AAV vector may have enhanced cardiac and/or skeletal muscle tissue tropism. The modified AAV vector may be capable of delivering and expressing the CRISPR/Cas9-based gene editing system in the cell of a mammal. For example, the modified AAV vector may be an AAV-SASTG vector (Piacentino et al. Human Gene Therapy 2012, 23, 635-646). The modified AAV vector may be based on one or more of several capsid types, including AAV1, AAV2, AAV5, AAV6, AAV8, and AAV9. The modified AAV vector may be based on AAV2 pseudotype with alternative muscle-tropic AAV capsids, such as AAV2/1, AAV2/6, AAV2/7, AAV2/8, AAV2/9, AAV2.5, and AAV/SASTG vectors that efficiently transduce skeletal muscle or cardiac muscle by systemic and local delivery (Seto et al. Current Gene Therapy 2012, 12, 139-151). The modified AAV vector may be AAV2i8G9 (Shen et al. J. Biol. Chem. 2013, 288, 28814-28823).

[0174] The genetic construct may comprise or encode a polynucleotide sequence selected from SEQ ID NOs: 55-107. The genetic construct may comprise a polynucleotide sequence of SEQ ID NO: 55. The genetic construct may comprise a polynucleotide sequence of SEQ ID NO: 56. The genetic construct may comprise a polynucleotide sequence of SEQ ID NO: 57. The genetic construct may comprise a polynucleotide sequence of SEQ ID NO: 58. The genetic construct may comprise a polynucleotide sequence of SEQ ID NO: 59. The genetic construct may comprise a polynucleotide sequence of SEQ ID NO: 60. The genetic construct may comprise a polynucleotide sequence of SEQ ID NO: 61. The genetic construct may comprise a polynucleotide sequence of SEQ ID NO: 62. The genetic construct may comprise a polynucleotide sequence of SEQ ID NO: 63. The genetic construct may comprise a polynucleotide sequence of SEQ ID NO: 64. The genetic construct may comprise a polynucleotide sequence of SEQ ID NO: 65. The genetic construct may comprise a polynucleotide sequence of SEQ ID NO: 66. The genetic construct may comprise a polynucleotide sequence of SEQ ID NO: 67. The genetic construct may comprise a polynucleotide sequence of SEQ ID NO: 68. The genetic construct may comprise a polynucleotide sequence of SEQ ID NO: 69. The genetic construct may comprise a polynucleotide sequence of SEQ ID NO: 70. The genetic construct may comprise a polynucleotide sequence of SEQ ID NO: 71. The genetic construct may comprise a polynucleotide sequence of SEQ ID NO: 72. The genetic construct may comprise a polynucleotide sequence of SEQ ID NO: 73. The genetic construct may comprise a polynucleotide sequence of SEQ ID NO: 74. The genetic construct may comprise a polynucleotide sequence of SEQ ID NO: 75. The genetic construct may comprise a polynucleotide sequence of SEQ ID NO: 76. The genetic construct may comprise a polynucleotide sequence of SEQ ID NO: 77. The genetic construct may comprise a polynucleotide sequence of SEQ ID NO: 78. The genetic construct may comprise a polynucleotide sequence of SEQ ID NO: 37. The genetic construct may comprise a polynucleotide sequence of SEQ ID NO: 53. The genetic construct may comprise a polynucleotide sequence of SEQ ID NO: 54.

### 7. Pharmaceutical Compositions

[0175] Further provided herein are pharmaceutical compositions comprising the above-described genetic constructs or gene editing systems. In some embodiments, the pharmaceutical composition may comprise about 1 ng to about 10 mg of DNA encoding the CRISPR/Cas-based gene editing system. The systems or genetic constructs as detailed herein, or at least one component thereof, may be formulated into pharmaceutical compositions in accordance with standard techniques well known to those skilled in the pharmaceutical art. The pharmaceutical compositions can be formulated according to the mode of administration to be used. In cases where pharmaceutical compositions are injectable pharmaceutical compositions, they are sterile, pyrogen free, and particulate free. An isotonic formulation is preferably used. Generally, additives for isotonicity may include sodium chloride, dextrose, mannitol, sorbitol and lactose. In some cases, isotonic solutions such as phosphate buffered saline are preferred. Stabilizers include gelatin and albumin. In some embodiments, a vasoconstriction agent is added to the formulation.

[0176] The composition may further comprise a pharmaceutically acceptable excipient. The pharmaceutically acceptable excipient may be functional molecules as vehicles, adjuvants, carriers, or diluents. The term “pharmaceutically acceptable carrier,” may be a non-toxic, inert solid, semi-solid or liquid filler, diluent, encapsulating material or formulation auxiliary of any type. Pharmaceutically acceptable carriers include, for example, diluents, lubricants, binders, disintegrants, colorants, flavors, sweeteners, antioxidants, preservatives, glidants, solvents, suspending agents, wetting agents, surfactants, emollients, propellants, humectants, powders, pH adjusting agents, and combinations thereof. The pharmaceutically acceptable excipient may be a transfection facilitating agent, which may include surface active agents, such as immune-stimulating complexes (ISCOMS), Freunds incomplete adjuvant, LPS analog including monophosphoryl lipid A, muramyl peptides, quinone analogs, vesicles such as squalene and squalene, hyaluronic acid, lipids, liposomes, calcium ions, viral proteins, polyanions, polycations, or nanoparticles, or other known transfection facilitating agents. The transfection facilitating agent may be a polyanion, polycation, including poly-L-glutamate (LGS), or lipid. The transfection facilitating agent may be poly-L-glutamate, and more preferably, the poly-L-glutamate may be present in the composition for gene editing in skeletal muscle or cardiac muscle at a concentration less than 6 mg/mL.

### 8. Administration

[0177] The systems or genetic constructs as detailed herein, or at least one component thereof, may be administered or delivered to a cell. Methods of introducing a nucleic acid into a host cell are known in the art, and any known method can be used to introduce a nucleic acid (e.g., an expression construct) into a cell. Suitable methods include, for example, viral or bacteriophage infection, transfection, conjugation, protoplast fusion, polycation or lipid:nucleic acid conjugates, lipofection, electroporation, nucleofection, immunoliposomes, calcium phosphate precipitation, polyethyleneimine (PEI)-mediated transfection, DEAE-dextran mediated transfection, liposome-mediated transfection, particle gun technology, calcium phosphate precipitation, direct micro injection, nanoparticle-mediated nucleic acid delivery, and the like. In some embodiments, the composition may be delivered by mRNA delivery and ribonucleoprotein (RNP) complex delivery. The system, genetic construct, or composition comprising the same, may be electroporated using BioRad Gene Pulser Xcell or Amaxa Nucleofector lIb devices or other electroporation device. Several different buffers may be used, including BioRad electroporation solution, Sigma phosphate-buffered saline product #D8537 (PBS), Invitrogen OptiMEM I (OM), or Amaxa Nucleofector solution V (N.V.). Transfections may include a transfection reagent, such as Lipofectamine 2000.

[0178] The systems or genetic constructs as detailed herein, or at least one component thereof, or the pharmaceutical compositions comprising the same, may be administered to a subject. Such compositions can be administered in dosages and by techniques well known to those skilled in the medical arts taking into consideration such factors as the age, sex, weight, and condition of the particular subject, and the route of administration. The presently disclosed systems, or at least one component thereof, genetic constructs, or compositions comprising the same, may be administered to a subject by different routes including orally, parenterally, sublingually, transdermally, rectally, transmucosally, topically, intranasal, intravaginal, via inhalation, via buccal administration, intrapleurally, intravenous, intraarterial, intraperitoneal, subcutaneous, intradermally, epidermally, intramuscular, intranasal, intrathecal, intracranial, and intraarticular or combinations thereof. In certain embodiments, the system, genetic construct, or composition comprising the same, is administered to a subject intramuscularly, intravenously, or a combination thereof. The systems, genetic constructs, or compositions comprising the same may be delivered to a subject by several technologies including DNA injection (also referred to as DNA vaccination) with and without in vivo electroporation, liposome mediated, nanoparticle facilitated, recombinant vectors such as recombinant lentivirus, recombinant adenovirus, and recombinant adenovirus associated virus. The composition may be injected into the brain or other component of the central nervous system. The composition may be injected into the skeletal muscle or cardiac muscle. For example, the composition may be injected into the tibialis anterior muscle or tail. For veterinary use, the systems, genetic constructs, or compositions comprising the same may be administered as a suitably acceptable formulation in accordance with normal veterinary practice. The veterinarian may readily determine the dosing regimen and route of administration that is most appropriate for a particular animal. The systems, genetic constructs, or compositions comprising the same may be administered by traditional syringes, needleless injection devices, “microprojectile bombardment gone guns,” or other physical methods such as electroporation (“EP”), “hydrodynamic method”, or ultrasound. Alternatively, transient in vivo delivery of CRISPR/Cas-based systems by non-viral or non-integrating viral gene transfer, or by direct delivery of purified proteins and gRNAs containing cell-penetrating motifs may enable highly specific correction and/or restoration in situ with minimal or no risk of exogenous DNA integration.

[0179] Upon delivery of the presently disclosed systems or genetic constructs as detailed herein, or at least one component thereof, or the pharmaceutical compositions comprising the same, and thereupon the vector into the cells of the subject, the transfected cells may express the gRNA molecule(s) and the Cas9 molecule or fusion protein.

[0180] a. Cell Types

[0181] Any of the delivery methods and/or routes of administration detailed herein can be utilized with a myriad of cell types. Further provided herein is a cell transformed or transduced with a system or component thereof as detailed herein. For example, provided herein is a cell comprising an isolated polynucleotide encoding a CRISPR/Cas9 system as detailed herein. Suitable cell types are detailed herein. In some embodiments, the cell is a cell type currently under investigation for cell-based therapies, including, but not limited to, immortalized myoblast cells, such as wild-type and DMD patient derived lines, primal DMD dermal fibroblasts, stem cells such as induced pluripotent stem cells, bone marrow-derived progenitors, skeletal muscle progenitors, human skeletal myoblasts from DMD patients, CD 133+ cells, mesoangioblasts, cardiomyocytes, hepatocytes, chondrocytes, mesenchymal progenitor cells, hematopoetic stem cells, muscle cells, satellite cells, smooth muscle cells, and MyoD- or Pax7-transduced cells, or other myogenic progenitor cells. Immortalization of human myogenic cells can be used for clonal derivation of genetically corrected myogenic cells. Cells can be modified ex vivo to isolate and expand clonal populations of immortalized DMD myoblasts that include a genetically corrected or restored dystrophin gene and are free of other nuclease-introduced mutations in protein coding regions of the genome. Cells can be modified in vitro to screen CRISPR/Cas-based gene editing systems, any cell line known to one of skill in the art may be used. In some embodiments, the cell line is human embryonic kidney 293 (HEK293) or HEK293T cells. In some embodiments, the virus is added to the cells at a multiplicity of infection (MOI) of at least 0.1, at least 0.2, at least 0.3, at least 0.4, at least 0.5, at least 0.6, at least 0.7, at least 0.8, at least 0.9, or at least 1.

### 9. Kits

[0182] Provided herein is a kit, which may be used to restore function to a dystrophin gene. The kit comprises genetic constructs or a composition comprising the same, and instructions for using said composition. In some embodiments, the kit comprises at least one gRNA comprising or encoded by a polynucleotide sequence selected from SEQ ID NOs: 5-78, a complement thereof, a variant thereof, or fragment thereof, or at least one gRNA that binds and targets a polynucleotide sequence comprising or selected from SEQ ID NOs: 55-78, a complement thereof, a variant thereof, or fragment thereof. In some embodiments, the kit comprises at least one gRNA comprising a polynucleotide sequence selected from SEQ ID NOs: 79-102, or a complement thereof, or a variant thereof, or a truncation thereof. The kit may further include instructions for using the CRISPR/Cas-based gene editing system.

[0183] Instructions included in kits may be affixed to packaging material or may be included as a package insert. While the instructions are typically written on printed materials they are not limited to such. Any medium capable of storing such instructions and communicating them to an end user is contemplated by this disclosure. Such media include, but are not limited to, electronic storage media (e.g., magnetic discs, tapes, cartridges, chips), optical media (e.g., CD ROM), and the like. As used herein, the term “instructions” may include the address of an internet site that provides the instructions.

[0184] The genetic constructs or a composition comprising thereof for restoring function to a dystrophin gene may include a modified AAV vector that includes a gRNA molecule(s) and a Cas9 protein or fusion protein, as described above, that specifically binds and cleaves a region of the dystrophin gene. The CRISPR/Cas-based gene editing system, as described above, may be included in the kit to specifically bind and target a particular region, for example, exon 51, in the gene.

### 10. Methods

[0185] a. Methods of Screening for Pairs of gRNA Molecules for Editing a Genomic Nucleic Acid

[0186] Provided herein are methods of high-throughput screening for pairs of gRNA molecules to be used in CRISPR/Cas9-based gene editing systems. The methods may include generating a plurality of pairs of gRNA molecules that target different nucleic acid sequences. For example, the methods of screening may include quantifying the level of editing a nucleic acid, for each individual pair of a plurality of gRNA molecules. The nucleic acid may be genomic nucleic acid. Each pair of gRNA molecules can include a first gRNA molecule that targets a first nucleic acid sequence and a second gRNA molecule that targets a second nucleic acid sequence. The first and second nucleic acid sequences can be a portion of different introns, the same intron, different exons, or the same exon. In some embodiments, the first nucleic acid sequence is a portion of intron 50 of the human dystrophin gene and the second nucleic acid sequence is a portion of intron 51 of the human dystrophin gene. The first nucleic acid sequence and the second nucleic acid sequence may each be at least 5 kb from an exon. The first nucleic acid sequence and the second nucleic acid sequence may each be about 1 kb from an exon, about 2 kb from an exon, about 3 kb from an exon, about 4 kb from an exon, about 5 kb from an exon, about 6 kb from an exon, about 7 kb from an exon, about 8 kb from an exon, about 9 kb from an exon, or about 10 kb from an exon. Each gRNA may comprise 0 consecutive thymine nucleotides (T's). Each gRNA may include at most 4 consecutive T's, at most 3 consecutive T's, or at most 2 consecutive T's. Each gRNA may have no predicted off-target binding in the human or mouse genome. Each gRNA can have at most 1 mismatch, 2 mismatches, 3 mismatches, 4 mismatches, or 5 mismatches with the nucleic acid sequence it targets. Each gRNA can be 95% complementary to the target nucleic acid sequence, 96% complementary to the target nucleic acid sequence, 97% complementary to the target nucleic acid sequence, 98% complementary to the target nucleic acid sequence, 99% complementary to the target nucleic acid sequence, or 100% complementary to the target nucleic acid sequence.

[0187] In some embodiments, the first nucleic acid sequence comprises a first intron of the dystrophin gene and the second nucleic acid sequence comprises a second intron of the dystrophin gene. In some embodiments, the first intron is adjacent to one side of the at least one exon and the second intron is adjacent to the other side of the at least one exon. In some embodiments, the at least one exon is in between the first and second introns in the genomic nucleic acid. In some embodiments, the genomic nucleic acid comprises two or more exons of a dystrophin gene, and the first intron is adjacent to one side of the two or more exons and the second intron is adjacent to the other side of the two or more exons. In some embodiments, the two or more exons are in between the first and second introns in the genomic nucleic acid.

[0188] The method may include expressing a Cas9 protein or a fusion protein comprising the Cas9 protein, and the plurality of pairs of gRNA molecules in a plurality of cells. One pair of gRNA molecules may be expressed in each cell. The first gRNA may direct the Cas9 protein or fusion protein to cut the first nucleic acid sequence and the second gRNA may direct the Cas9 protein or fusion protein to cut the second nucleic acid sequence, thereby forming an excised nucleic acid and a new junction in the genomic nucleic acid.

[0189] In some embodiments, the expression is effected by transfecting the plurality of cells with a plurality of vectors. Each cell may be transfected with a first vector encoding one pair of gRNA molecules and a second vector encoding the Cas9 protein or fusion protein. In some embodiments, each cell is transfected with a different first vector encoding a different pair of gRNA molecules. The method may include transfecting cells with lentiviruses comprising a vector encoding a Cas9 protein or a fusion protein comprising the Cas9 protein such that the cells express the Cas9 protein. The method may also include transfecting the Cas9 protein-expressing cells with a variety of lentiviruses, each lentivirus comprising a vector encoding a pair of gRNA molecules. Each virus comprises a different vector encoding a different pair of gRNA molecules. Each cell is transfected with a different lentivirus. In the cell, the first gRNA molecule directs the Cas9 protein to the first nucleic acid sequence and the second gRNA molecule directs the Cas9 protein to the second nucleic acid sequence. This introduces site-specific double strand breaks at targeted genomic loci and excision of a nucleic acid resulting in modification of the genomic nucleic acid. The method may further include isolation of the modified genomic nucleic acid (i.e., genomic DNA) from the cells by methods known in the art, such as a DNA extraction kit.

[0190] In some embodiments, the excised nucleic acid comprises exon 51. In some embodiments, the first nucleic acid sequence is within intron 50 of the dystrophin gene. In some embodiments, the second nucleic acid sequence is within intron 51 of the dystrophin gene.

[0191] The junctions in the isolated genomic nucleic acid may be enriched by first binding probes with specificity for a portion of the first nucleic acid sequence. The genomic nucleic acid bound to the probes can be isolated using any method known the in art, such as with magnetic beads, such as streptavidin coated beads. Next, the isolated genomic nucleic acid can be incubated with probes with specificity for a portion of the second nucleic acid sequence and isolated. The probes may bind at the site of the double strand breaks (i.e., the new junction) in the genomic nucleic acid. At least 1 probe may specifically bind the new junction, at least 2 probes may specifically bind the new junction, at least 3 probes may specifically bind the new junction, at least 4 probes may specifically bind the new junction, and at least 5 probes may specifically bind the new junction. The probes may each bind to the new junction and a different portion of the first nucleic acid sequence. In some embodiments, the genomic nucleic acid is contacted with a first pool of probes, wherein one or more different probes specifically bind to each new junction and a portion of the first nucleic acid sequence. In some embodiments, the genomic nucleic acid is contacted with a first pool of probes, wherein at least 3 different probes specifically bind to each new junction and a portion of the first nucleic acid sequence. The genomic nucleic acid bound to the first pool of probes may be isolated, and then the genomic nucleic acid bound to the first pool of probes may be contacted with a second pool of probes, wherein one or more different probes specifically bind to each new junction and a portion of the second nucleic acid sequence. The genomic nucleic acid bound to the first pool of probes may be isolated, and then the genomic nucleic acid bound to the first pool of probes may be contacted with a second pool of probes, wherein at least 3 different probes specifically bind to each new junction and a portion of the second nucleic acid sequence. The genomic nucleic acid bound to the second pool of probes may be isolated.

[0192] The probes may bind 10 bp away from the site of the double strand break in the genomic nucleic acid. The probes may bind 20 bp away from the site of the double strand break in the genomic nucleic acid. The probes may bind 30 bp away from the site of the double strand break in the genomic nucleic acid. The probes may have a length of about 100 bp to about 140 bp, about 105 bp to about 135 bp, about 110 bp to about 130 bp, or about 115 bp to about 125 bp. The probes may have a length of about 102 bp, about 103 bp, about 104 bp, about 105 bp, about 106 bp, about 107 bp, about 108 bp, about 109 bp, about 110 bp, about 111 bp, about 112 bp, about 113 bp, about 114 bp, about 115 bp, about 116 bp, about 117 bp, about 118 bp, about 119 bp, about 120 bp, about 121 bp, about 122 bp, about 123 bp, about 124 bp, about 125 bp, about 126 bp, about 127 bp, about 128 bp, about 129 bp, about 130 bp, about 131 bp, about 132 bp, about 133 bp, about 134 bp, about 135 bp, about 136 bp, about 137 bp, about 138 bp, about 139 bp, or about 140 bp. In some embodiments, the probes have a length of about 120 bp.

[0193] Each probe may comprise any suitable affinity label known in the art. In some embodiments, the probes are biotinylated probes.

[0194] b. Methods of Identifying a Pair of gRNA Molecules

[0195] Provided herein are methods of identifying pairs of gRNA molecules that produce unique junctions in the genomic nucleic acid at a relatively high frequency and high deletion efficiency. In addition to the methods as described above, the methods may include sequencing the genomic nucleic acid that bound to the probes with specificity for a portion of the first nucleic acid sequence and the probes with specificity for a portion of the second nucleic acid sequence. Sequencing may be performed by methods known in the art, such as using an Illumina NextSeq. Further, the method can include aligning the sequenced genomic nucleic acid to identify the new junctions made by the CRISPR/Cas9-based gene editing system comprising the pairs of gRNA molecules and assigning each new junction to the corresponding pair of gRNA molecules. The pairs of gRNA molecules with the greatest number of new junctions with the greatest deletion efficiency can be determined from the preceding assignment, where the deletion efficiency can be measured by the frequency of each new junction.

[0196] Further provided herein is a pair of gRNA molecules identified by the method detailed herein. Further provided herein is a CRISPR/Cas9 system comprising such a pair of gRNA molecules. The gRNA may by encoded by or bind and target a polynucleotide sequence comprising at least one of SEQ ID NOs: 55-78. The gRNA may comprise a polynucleotide sequence selected from SEQ ID NOs: 79-102.

[0197] c. Methods of Editing a Genomic Nucleic Acid in a Subject

[0198] Provided herein are methods of editing a genomic nucleic acid in a cell or subject. The genomic nucleic acid may be a mutant dystrophin gene or a mutant human dystrophin gene that causes disease, such as DMD. The method can include administering to a cell or a subject a presently disclosed system or genetic construct or a composition comprising thereof as described above. The method can comprise administering to the skeletal muscle and/or cardiac muscle of the subject the presently disclosed system or genetic construct or a composition comprising the same for editing a genomic nucleic acid in skeletal muscle and/or cardiac muscle, as described above. Use of the presently disclosed system or genetic construct or a composition comprising the same to deliver the CRISPR/Cas9-based gene editing system to the skeletal muscle or cardiac muscle may restore the expression of a fully-functional or partially functional protein. The CRISPR/Cas9-based gene editing system may be used to introduce site-specific double strand breaks at targeted genomic loci. Site-specific double-strand breaks are created when the CRISPR/Cas9-based gene editing system binds to target DNA sequences, thereby permitting cleavage of the target DNA. This DNA cleavage may stimulate the natural DNA-repair machinery, leading to one of two possible repair pathways: homology-directed repair (HDR) or the non-homologous end joining (NHEJ) pathway. The method may include administering a CRISPR/Cas9-based gene editing system, such as administering a Cas9 protein or Cas9 fusion protein, a nucleotide sequence encoding said Cas9 protein or Cas9 fusion protein, and/or at least one gRNA, wherein the gRNAs target different DNA sequences. The target DNA sequences may be overlapping. The number of gRNA administered to the cell may be at least 1 gRNA, at least 2 different gRNA, at least 3 different gRNA at least 4 different gRNA, at least 5 different gRNA, at least 6 different gRNA, at least 7 different gRNA, at least 8 different gRNA, at least 9 different gRNA, at least 10 different gRNA, at least 15 different gRNA, at least 20 different gRNA, at least 30 different gRNA, or at least 50 different gRNA, as described above. This strategy may integrate the rapid and robust assembly of active CRISPR/Cas9-based gene editing system with an efficient gene editing method for the treatment of genetic diseases caused by mutations in nonessential coding regions that cause frameshifts, premature stop codons, aberrant splice donor sites or aberrant splice acceptor sites.

[0199] d. Methods of Correcting a Mutant Gene and Treating a Subject

[0200] Provided herein are methods of correcting a mutant gene (for example, a mutant dystrophin gene) in a cell and treating a subject suffering from a genetic disease, such as DMD. The method can include administering to a cell or a subject a presently disclosed system or genetic construct or a composition comprising the same as described above. The method can comprise administering to the skeletal muscle and/or cardiac muscle of the subject the presently disclosed system or genetic construct or a composition comprising the same for genome editing in skeletal muscle and/or cardiac muscle, as described above. Use of the presently disclosed system or genetic construct or a composition comprising the same to deliver the CRISPR/Cas9-based gene editing system to the skeletal muscle or cardiac muscle may restore the expression of a fully-functional or partially functional protein with a repair template or donor DNA, which can replace the entire gene or the region containing the mutation. The CRISPR/Cas9-based gene editing system may be used to introduce site-specific double strand breaks at targeted genomic loci. Site-specific double-strand breaks are created when the CRISPR/Cas9-based gene editing system binds to a target DNA sequences, thereby permitting cleavage of the target DNA. This DNA cleavage may stimulate the natural DNA-repair machinery, leading to one of two possible repair pathways: homology-directed repair (HDR) or the non-homologous end joining (NHEJ) pathway.

[0201] The present disclosure is further directed to genome editing with a CRISPR/Cas9-based gene editing system without a repair template, which can efficiently correct the reading frame and restore the expression of a functional protein involved in a genetic disease. The disclosed CRISPR/Cas9-based gene editing system and methods may involve using homology-directed repair or nuclease-mediated non-homologous end joining (NHEJ)-based correction approaches, which enable efficient correction in proliferation-limited primary cell lines that may not be amenable to homologous recombination or selection-based gene correction. This strategy integrates the rapid and robust assembly of active CRISPR/Cas9-based gene editing system with an efficient gene editing method for the treatment of genetic diseases caused by mutations in nonessential coding regions that cause frameshifts, premature stop codons, aberrant splice donor sites or aberrant splice acceptor sites.

[0202] The present disclosure also provides methods of correcting a mutant gene in a cell and treating a subject suffering from a genetic disease, such as DMD. The method may include administering to a cell or subject a CRISPR/Cas9-based gene editing system, a polynucleotide or vector encoding said CRISPR/Cas9-based gene editing system, or a composition of said CRISPR/Cas9-based gene editing system as described above. The method may include administering a CRISPR/Cas9-based gene editing system, such as administering a Cas9 protein or Cas9 fusion protein containing a second domain having nuclease activity, a nucleotide sequence encoding said Cas9 protein or Cas9 fusion protein, and/or at least one gRNA. The gRNAs may target different DNA sequences.

[0203] e. Methods of Treating Disease

[0204] Provided herein are methods of treating a subject in need thereof. The method may comprise administering to a tissue of a subject the presently disclosed system or genetic construct or a composition comprising thereof, as described above. In certain embodiments, the method may comprise administering to the skeletal muscle or cardiac muscle of the subject the presently disclosed system or genetic construct or composition comprising thereof, as described above. In certain embodiments, the method may comprise administering to a vein of the subject the presently disclosed system or genetic construct or composition comprising thereof, as described above. In certain embodiments, the subject is suffering from a skeletal muscle or cardiac muscle condition causing degeneration or weakness or a genetic disease. For example, the subject may be suffering from Duchenne muscular dystrophy, as described above.

[0205] i) Duchenne Muscular Dystrophy

[0206] The method, as described above, may be used for correcting the dystrophin gene and recovering full-functional or partially-functional protein expression of said mutated dystrophin gene. In some aspects and embodiments the disclosure provides a method for reducing the effects (for example, clinical symptoms or indications) of DMD in a subject. In some aspects and embodiments the disclosure provides a method for treating DMD in a subject. In some aspects and embodiments the disclosure provides a method for preventing DMD in a subject. In some aspects and embodiments the disclosure provides a method for preventing further progression of DMD in a subject.

[0207] f. Methods of Screening Therapeutic Agents

[0208] Provided herein are methods of screening therapeutic agents for treating Duchenne muscular dystrophy (DMD). The method may include administering one or more therapeutic agents to the transgenic mouse detailed herein. The one or more therapeutic agents may be a small molecule, anti-sense RNA, vector, CRISPR/Cas gene editing system, or biological agent, or a combination thereof. The vector may be a viral vector encoding a gene of interest, such as an AAV vector. In some embodiments, the mouse after administration of the one or more therapeutic agents exhibits increased lifespan, reduced body mass, increased body strength, increased motor coordination, increased balance, increased forelimb strength, reduced muscle injury, and/or reduced CK level compared to before administration of the one or more therapeutic agents. In some embodiments, the mouse after administration of the one or more therapeutic agents exhibits increased expression of a dystrophin gene as compared to before administration of the one or more therapeutic agents. The dystrophin gene may be a truncated human dystrophin gene. The truncated human dystrophin gene may include a plurality of deletions relative to a wild-type human dystrophin gene. In some embodiments, at least one of the deletions is in exon 52.

### 11. Examples

[0209] The foregoing may be better understood by reference to the following examples, which are presented for purposes of illustration and are not intended to limit the scope of the invention. The present disclosure has multiple aspects and embodiments, illustrated by the appended non-limiting examples.

### Example 1

### Screening a Pool of gRNA Pairs for Exon Deletion

[0210] For SaCas9 deletion of human DMD exon 51, gRNAs within 5 kb of the exon with no poly T's and no predicted off-targets in the human genome with up to 3 mismatches were used (FIG. 1A). Individual gRNAs located in each relevant intron were identified computationally with GT scan software. Sequences with 4 or more consecutive T's were discarded as they would interfere with transcription. Potential binding sites to other locations in the genome were calculated, and only gRNAs with no predicted off-targets with up to 3 mismatched base pairs were selected. The library of gRNA pairs was created by pairing every gRNA in the first intron with every gRNA in the second intron. This resulted in 52 gRNAs in intron 50 and 40 gRNAs in intron 51, totaling 2,080 gRNA pairs (FIG. 1B). The sequence of each gRNA pair was synthesized as a single-stranded DNA oligo in a pooled format. This pool was amplified and cloned into a plasmid backbone between a human U6 promoter and an SaCas9 scaffold. This plasmid also had a puromycan selection cassette. After preparation of this plasmid pool, a second digestion between the two gRNAs was performed, and a second promoter (mouse U6) and a second SaCas9 scaffold was inserted into the plasmid. The result was a lentiviral plasmid pool where each plasmid contained hU6− intron 1 gRNA− SaCas9 scaffold− mU6− intron 2 gRNA− SaCas9 scaffold. This plasmid pool was then sequenced to confirm full coverage of the gRNA pair library, and then lentivirus was generated and subsequently titered. Each lentivirus contained one gRNA pair.

[0211] Lentivirus that expressed SaCas9 from a constitutive EFS promoter with a 2A hygromycin selection cassette was produced. HEK293T cells were transduced with the lentivirus, underwent hygromycin selection, and were then sorted into a 96-well plate with a single cell in each well. Clones of these single cells were grown up and stained for high expression of SaCas9. The Cas9-expressing HEK293T cells were transduced with the lentiviral library containing the gRNA pairs. The virus was added at an MOI of 0.2, such that at any cell received at most one viral particle, and thus one pair of gRNAs. The library was transduced at 1,000x coverage, such that each gRNA pair should have been introduced to approximately 1,000 cells. Cells were selected with puromycin for 5 days so that all non-transduced cells died. All of the cells were harvested 7 days after the initial transduction. Cells from the same line not treated with the library were also harvested.

[0212] After treating a cell population with the library of gRNA pairs, junctions were enriched (FIG. 1C). Genomic DNA (gDNA) was extracted from the harvested cells with the Qiagen Blood and Cell Culture Midi Kit and DNA concentration was quantified. Using the Kapa HyperPlus Library Prep Kit, the gDNA was randomly fragmented and adapters were added to create ˜350 bp libraries from both the screen and non-treated gDNA. 20 ug of gDNA per sample was used to generate these libraries, maintaining 1000x coverage of the gRNA pair library. Two pools of dsDNA biotinylated probes were designed, one in each intron containing gRNAs (FIG. 2). Probes were designed for each gRNA and can theoretically bind independently of how the DNA has been edited, whether wild-type or any gRNA-to-gRNA exon deletion. They can also be applied to untreated DNA to determine the bias caused by the probes for sequencing some regions more than others. The probes were designed such that they began at the expected cut site of each gRNA, and extended away from the direction of the expected deletion 120 bp. Three of these 120 bp probes were designed for each gRNA, tiling back 10 bp away from the deletion each time. In order to enrich for edited fragments in the region of interest before sequencing, the sequencing libraries in step 5 were hybridized to the first intron probe pool, pulled down with streptavidin-coated beads, and then were subjected to a second hybridization and pulldown with the probe pool for the second intron. Only molecules with sequences targeted by both probe pools should have remained, thus enriching for molecules encoding an edited sequence. The libraries from the non-treated samples were also subjected to probe pulldown, but with both pools simultaneously. These samples were used to determine the sequencing coverage after pulldown to account for any bias the probes had to make certain regions more or less represented when sequenced. Another important normalization step was to account for the initial abundance of each gRNA pair in the starting lentiviral library. To measure this, PCR was performed on the gDNA harvested from library-treated cells at 500x coverage to amplify out the dual-gRNA lentiviral genome integrated into those cell's genomes.

[0213] Despite the probe hybridization step used to enrich for edited sequences, the percent of sequencing reads containing a unique junction of one gRNA to another is low, around 0.065%. As a result, hundreds of millions of sequencing reads are necessary to achieve 100x coverage of the original gRNA pair library. All probe-hybridized samples were sequenced on an Illumina NextSeq, while the amplified gRNA sequences were sequenced on an Illumina MiSeq. The final step was to align the sequencing data to identify the novel junctions formed by exon deletions, assign each junction to the gRNA pair that created it, normalize the appropriate variables, and determine the relative efficiency of each gRNA pair (FIG. 1D). Since each gRNA pair yields a unique junction, the frequency of each junction was a direct measure of the deletion efficiency for a gRNA pair. The enrichment and sequencing methods were first tested on cells that only received a single gRNA pair (FIG. 3). This confirmed both the ability to detect the unique intron-intron junction as well as the hypothesis that the majority of deletions are the perfect ligation of the expected gRNA cut-sites. The frequency with which deletion-making gRNA pairs were identified by sequencing was normalized by initial gRNA abundance and bias introduced by probe hybridization. For all 2,080 pairs shown, many were not detected, but several pairs were detected with high frequency as measured by sequencing read counts for each gRNA pair (FIG. 4). The top 25 pairs identified with high frequency are shown in FIG. 5 and TABLE 1, including SEQ ID NOs: 55-78. The sequences in TABLE 1 are the sequences of the DNA target that the gRNA binds and targets. Corresponding RNA sequences are in TABLE 2.

TABLE 1

| Pair | Intron 50 | | | Intron 51 | | |
|---|---|---|---|---|---|---|
| Rank | gRNA ID | SEQ ID NO | Intron 50 gRNA 5′-3′ | gRNA ID | SEQ ID NO | Intron 51 gRNA 5′-3′ |
| 1 | V_50_6 | SEQ ID NO: 55 | CCCCAAAATGTGAAATACTTG | V_51_36 | SEQ ID NO: 71 | GTGGATAGCTTGATGGATAAT |
| 2 | V_50_4 | SEQ ID NO: 56 | ATAGCTGATAGTAGTTGAGAG | V_51_36 | SEQ ID NO: 71 | GTGGATAGCTTGATGGATAAT |
| 3 | V_50_4 | SEQ ID NO: 57 | TATGAATAGTGTTGGACACTG | V_51_24 | SEQ ID NO: 72 | AGGTAGATAGAGAGGCACAGT |
| 4 | V_50_4 | SEQ ID NO: 58 | GCAGGGTCGTATTGTTGTGCC | V_51_9 | SEQ ID NO: 73 | CAATTTGCCTTCTCCAATGAT |
| 5 | V_50_9 | SEQ ID NO: 59 | CACACAGCTGGGTTATCAGAG | V_51_1 | SEQ ID NO: 74 | AACTGGTGGGAAATGGTCTAG |
| 6 | V_50_4 | SEQ ID NO: 57 | TATGAATAGTGTTGGACACTG | V_51_1 | SEQ ID NO: 74 | AACTGGTGGGAAATGGTCTAG |
| 7 | V_50_8 | SEQ ID NO: 60 | ATACTAAATACCAACACACAG | V_51_1 | SEQ ID NO: 74 | AACTGGTGGGAAATGGTCTAG |
| 8 | V_50_4 | SEQ ID NO: 61 | ATAATCTAGAACGAACGGGTA | V_51_14 | SEQ ID NO: 75 | GTGTTATTACTTGCTACTGCA |
| 9 | V_50_4 | SEQ ID NO: 62 | TGAAATGGCCTGTGCTCATGA | V_51_24 | SEQ ID NO: 72 | AGGTAGATAGAGAGGCACAGT |
| 10 | V_50_6 | SEQ ID NO: 55 | CCCCAAAATGTGAAATACTTG | V_51_1 | SEQ ID NO: 74 | AACTGGTGGGAAATGGTCTAG |
| 11 | V_50_5 | SEQ ID NO: 63 | TAGAACGAACGGGTAAAGAGT | V_51_24 | SEQ ID NO: 74 | AACTGGTGGGAAATGGTCTAG |
| 12 | V_50_5 | SEQ ID NO: 64 | GTGTATTGCTTGTACTACTCA | V_51_1 | SEQ ID NO: 74 | AACTGGTGGGAAATGGTCTAG |
| 13 | V_50_2 | SEQ ID NO: 65 | AAGATATATAATGTCATGAAT | V_51_14 | SEQ ID NO: 75 | GTGTTATTACTTGCTACTGCA |
| 14 | V_50_2 | SEQ ID NO: 66 | TCTTGCATCTTGCACATGTCC | V_51_24 | SEQ ID NO: 72 | AGGTAGATAGAGAGGCACAGT |
| 15 | V_50_8 | SEQ ID NO: 60 | ATACTAAATACCAACACACAG | V_51_6 | SEQ ID NO: 76 | CAGAATCAAATATAATAGTCT |
| 16 | V_50_3 | SEQ ID NO: 67 | GAATGGAGAGAGGTAAGTCTG | V_51_1 | SEQ ID NO: 74 | AACTGGTGGGAAATGGTCTAG |
| 17 | V_50_6 | SEQ ID NO: 55 | CCCCAAAATGTGAAATACTTG | V_51_24 | SEQ ID NO: 72 | AGGTAGATAGAGAGGCACAGT |
| 18 | V_50_5 | SEQ ID NO: 64 | GTGTATTGCTTGTACTACTCA | V_51_24 | SEQ ID NO: 72 | AGGTAGATAGAGAGGCACAGT |
| 19 | V_50_5 | SEQ ID NO: 63 | TAGAACGAACGGGTAAAGAGT | V_51_1 | SEQ ID NO: 74 | AACTGGTGGGAAATGGTCTAG |
| 20 | V_50_4 | SEQ ID NO: 57 | TATGAATAGTGTTGGACACTG | V_51_28 | SEQ ID NO: 77 | GAATCCTTTGTTGCCAGACTG |
| 21 | V_50_2 | SEQ ID NO: 68 | TTATCTGCCCATGACTGGCGC | V_51_24 | SEQ ID NO: 72 | AGGTAGATAGAGAGGCACAGT |
| 22 | V_50_29 | SEQ ID NO: 69 | TTTCATTGTCTGCTCCAAGCA | V_51_1 | SEQ ID NO: 74 | AACTGGTGGGAAATGGTCTAG |
| 23 | V_50_8 | SEQ ID NO: 60 | ATACTAAATACCAACACACAG | V_51_24 | SEQ ID NO: 72 | AGGTAGATAGAGAGGCACAGT |
| 24 | V_50_5 | SEQ ID NO: 64 | GTGTATTGCTTGTACTACTCA | V_51_13 | SEQ ID NO: 78 | AGCAAGTAATAACACAAGCTT |
| 25 | V_50_4 | SEQ ID NO: 70 | TGAATCCATAATCTAGAACGA | V_51_28 | SEQ ID NO: 77 | GAATCCTTTGTTGCCAGACTG |

TABLE 2

| Pair | Intron 50 | | | Intron 51 | | |
|---|---|---|---|---|---|---|
| Rank | gRNA ID | SEQ ID NO | Intron 50 gRNA 5′-3′ | gRNA ID | SEQ ID NO | Intron 51 gRNA 5′-3′ |
| 1 | V_50_6 | SEQ ID NO: 79 | CCCCAAAAUGUGAAAUACUUG | V_51_36 | SEQ ID NO: 95 | GUGGAUAGCUUGAUGGAUAAU |
| 2 | V_50_4 | SEQ ID NO: 80 | AUAGCUGAUAGUAGUUGAGAG | V_51_36 | SEQ ID NO: 95 | GUGGAUAGCUUGAUGGAUAAU |
| 3 | V_50_4 | SEQ ID NO: 81 | UAUGAAUAGUGUUGGACACUG | V_51_24 | SEQ ID NO: 96 | AGGUAGAUAGAGAGGCACAGU |
| 4 | V_50_4 | SEQ ID NO: 82 | GCAGGGUCGUAUUGUUGUGCC | V_51_9 | SEQ ID NO: 97 | CAAUUUGCCUUCUCCAAUGAU |
| 5 | V_50_9 | SEQ ID NO: 83 | CACACAGCUGGGUUAUCAGAG | V_51_1 | SEQ ID NO: 98 | AACUGGUGGGAAAUGGUCUAG |
| 6 | V_50_4 | SEQ ID NO: 81 | UAUGAAUAGUGUUGGACACUG | V_51_1 | SEQ ID NO: 98 | AACUGGUGGGAAAUGGUCUAG |
| 7 | V_50_8 | SEQ ID NO: 84 | AUACUAAAUACCAACACACAG | V_51_1 | SEQ ID NO: 98 | AACUGGUGGGAAAUGGUCUAG |
| 8 | V_50_4 | SEQ ID NO: 85 | AUAAUCUAGAACGAACGGGUA | V_51_14 | SEQ ID NO: 99 | GUGUUAUUACUUGCUACUGCA |
| 9 | V_50_4 | SEQ ID NO: 86 | UGAAAUGGCCUGUGCUCAUGA | V_51_24 | SEQ ID NO: 96 | AGGUAGAUAGAGAGGCACAGU |
| 10 | V_50_6 | SEQ ID NO: 79 | CCCCAAAAUGUGAAAUACUUG | V_51_1 | SEQ ID NO: 98 | AACUGGUGGGAAAUGGUCUAG |
| 11 | V_50_5 | SEQ ID NO: 87 | UAGAACGAACGGGUAAAGAGU | V_51_24 | SEQ ID NO: 96 | AGGUAGAUAGAGAGGCACAGU |
| 12 | V_50_5 | SEQ ID NO: 88 | GUGUAUUGCUUGUACUACUCA | V_51_1 | SEQ ID NO: 98 | AACUGGUGGGAAAUGGUCUAG |
| 13 | V_50_2 | SEQ ID NO: 89 | AAGAUAUAUAAUGUCAUGAAU | V_51_14 | SEQ ID NO: 99 | GUGUUAUUACUUGCUACUGCA |
| 14 | V_50_2 | SEQ ID NO: 90 | UCUUGCAUCUUGCACAUGUCC | V_51_24 | SEQ ID NO: 96 | AGGUAGAUAGAGAGGCACAGU |
| 15 | V_50_8 | SEQ ID NO: 84 | AUACUAAAUACCAACACACAG | V_51_6 | SEQ ID NO: 100 | CAGAAUCAAAUAUAAUAGUCU |
| 16 | V_50_3 | SEQ ID NO: 91 | GAAUGGAGAGAGGUAAGUCUG | V_51_1 | SEQ ID NO: 98 | AACUGGUGGGAAAUGGUCUAG |
| 17 | V_50_6 | SEQ ID NO: 79 | CCCCAAAAUGUGAAAUACUUG | V_51_24 | SEQ ID NO: 96 | AGGUAGAUAGAGAGGCACAGU |
| 18 | V_50_5 | SEQ ID NO: 88 | GUGUAUUGCUUGUACUACUCA | V_51_24 | SEQ ID NO: 96 | AGGUAGAUAGAGAGGCACAGU |
| 19 | V_50_5 | SEQ ID NO: 87 | UAGAACGAACGGGUAAAGAGU | V_51_1 | SEQ ID NO: 98 | AACUGGUGGGAAAUGGUCUAG |
| 20 | V_50_4 | SEQ ID NO: 81 | UAUGAAUAGUGUUGGACACUG | V_51_28 | SEQ ID NO: 101 | GAAUCCUUUGUUGCCAGACUG |
| 21 | V_50_2 | SEQ ID NO: 92 | UUAUCUGCCCAUGACUGGCGC | V_51_24 | SEQ ID NO: 96 | AGGUAGAUAGAGAGGCACAGU |
| 22 | V_50_2 | SEQ ID NO: 93 | UUUCAUUGUCUGCUCCAAGCA | V_51_1 | SEQ ID NO: 98 | AACUGGUGGGAAAUGGUCUAG |
| 23 | V_50_8 | SEQ ID NO: 84 | AUACUAAAUACCAACACACAG | V_51_24 | SEQ ID NO: 96 | AGGUAGAUAGAGAGGCACAGU |
| 24 | V_50_5 | SEQ ID NO: 88 | GUGUAUUGCUUGUACUACUCA | V_51_13 | SEQ ID NO: 102 | AGCAAGUAAUAACACAAGCUU |
| 25 | V_50_4 | SEQ ID NO: 94 | UGAAUCCAUAAUCUAGAACGA | V_51_28 | SEQ ID NO: 101 | GAAUCCUUUGUUGCCAGACUG |

### Example 2

### Generation of Dystrophin and Utrophin Double Knockout Mouse

[0214] One humanized mouse model of DMD is based on the mdx mouse model described by C. E. Nelson et al., Science 10.1126/science.aad5143 (2015). The mdx mouse carries a nonsense mutation in exon 23 of the mouse dystrophin gene, which results in production of a full-length dystrophin mRNA transcript and encodes a truncated dystrophin protein. These molecular changes are accompanied by functional changes including reduced twitch and tetanic force in mdx muscle. The mdx mouse has been humanized by the addition of a full-length human dystrophin transgene comprising a deletion of exon 52 (“hDMDΔ52/mdx mouse”).

[0215] The hDMDΔ52/mdx mice were made by injecting a CRISPR/Cas9 system including a S. pyogenes Cas9 molecule and a pair of gRNAs targeting intron 51 and intron 52 of the human dystrophin gene, respectively, to the embryos of mdx mice containing the human dystrophin transgene. No dystrophin protein is detected in the heart and tibialis anterior muscle of the hDMDΔ52/mdx mice.

[0216] The + indicates the mice have 1 allele for the mutation or gene. For example, hDMDΔ52+/+ indicates that the mice have two positive alleles (i.e. homozygous) for the hDMDΔ52 mutation. These mice were used for breeding purposes and are dystrophin null. For the following studies, hDMDΔ52+/−; mdx mice (i.e. dystrophin null) were used. Male breeders (Utrn−/−; mdx) were purchased from the Jackson laboratory (stock #014563) and bred to mdx homozygous females to obtain Utrn+/−; mdx females (FIG. 6). Utrn+/−; mdx females were bred with male hDMDΔ52+/+; mdx mice to obtain hDMDΔ52+/−; Utrn+/−; mdx females (FIG. 7, step 2). Male hDMDΔ52+/+; mdx mice were bred with hDMDΔ52+/−; Utrn+/−; mdx females to obtain hDMDΔ52+/+; Utrn+/−; mdx males (FIG. 7, step 3). Male hDMDΔ52+/+; Utrn+/−; mdx were bred with Utrn+/−; mdx females to obtain hDMDΔ52+/−; Utrn−/−; mdx male study mice (FIG. 7, step 4).

### Example 3

### Loss of Utrophin Exacerbates the DMD Phenotype of hDMDΔ52/Mdx Mice

[0217] Mice were subjected to rotarod testing beginning at 6 weeks of age to assess motor coordination, whole body strength, and balance. Mice were placed on the rotarod, which accelerated from 4 to 40 rpm over a period of 5 min. The time to first fall was recorded. If mice fell within 30 seconds of the run, they were placed back on the rotarod for a second attempt. Data from isolated time points (8, 12, and 16 weeks) are shown in FIG. 8A-FIG. 8C. hDMDΔ52/mdx/Utrn KO mice (i.e. hDMDΔ52+/−; Utrn−/−; mdx) displayed significantly shortened running times compared to Utrn WT (i.e. hDMDΔ52+/−; Utrn+/+; mdx) and Utrn het (i.e. hDMDΔ52+/−; Utrn+/−; mdx) mice at later time points. Rotarod performance over time is shown in FIG. 8D, demonstrating significantly decreased running times for Utrn KO mice. Statistical analysis was performed using a t-test with Welch's correction to compare groups in FIG. 8A-FIG. 8C. A two-way ANOVA with Tukey's test was performed for rotarod performance over time (TABLE 3). Overall, these data demonstrate that loss of utrophin exacerbates the phenotype of the hDMDΔ52/mdx mice.

TABLE 3

| Comparison | P value |
|---|---|
| hDMD vs. del52/utrn WT | <0.00001 |
| hDMD vs. del52/utrn het | <0.00001 |
| hDMD vs. del52/utrn KO | <0.00001 |
| del52/utrn WT vs. del52/utrn het | 0.1778 (n.s.) |
| del52/utrn WT vs. del52/utrn KO | <0.00001 |
| del52/utrn het vs. del52/utrn KO | <0.00001 |

[0218] Mice were subjected to forelimb grip strength testing to assess forelimb strength. Data from isolated time points are shown in FIG. 9A, FIG. 9B, and FIG. 9C. hDMDΔ52/mdx/Utrn KO mice displayed decreased grip strength compared to Utrn WT and Utrn het mice, particularly at 8 weeks of age. Statistical analysis was performed using a t-test with Welch's correction to compare groups. Results from a rotarod assay are shown in FIG. 9D. These data indicate that loss of utrophin exacerbates the phenotype of the hDMDΔ52/mdx mice.

### Example 4

### Loss of Utrophin Exacerbates the DMD Physiological Characteristics of hDMDΔ52/Mdx Mice

[0219] Body mass of hDMDΔ52/mdx/Utrn WT, hDMDΔ52/mdx/Utrn het and hDMDΔ52/mdx/Utrn KO mice was recorded over time (FIG. 10A). Statistical analysis was performed using a two-way ANOVA with Tukey's test (TABLE 4). Muscle mass was recorded at 24 weeks of age (FIG. 10B). These data show that loss of utrophin decreases body and muscle mass of hDMDΔ52/mdx mice.

| Comparison | P value |
|---|---|
| hDMD vs. del52/utrn WT | <0.00001 |
| hDMD vs. del52/utr het | <0.00001 |
| hDMD vs. del52/utr KO | <0.00001 |
| del52/utrn WT vs. del52/utrn het | <0.00001 |
| del52/utrn WT vs. del52/utrn KO | <0.00001 |
| del52/utrn het vs. del52/utrn KO | <0.00001 |

[0220] Lifespan was compared amongst the different genotypes. hDMDΔ52/mdx/Utrn KO mice displayed a noticeably shortened lifespan (median survival of ˜19 weeks of age), while other genotypes remained viable over the entire course of the study (FIG. 11).

[0221] H&E staining was performed to assess dystrophic pathology in diaphragm muscle at 24 weeks of age. Control hDMD/mdx mice displayed normal muscle histology consisting of organized, uniformly sized muscle fibers (pink) with peripheral nuclei (blue) (FIG. 12A). Dystrophic pathology was observed in hDMDΔ52/mdx mice, which is marked by regenerating (smaller) fibers with centralized nuclei, disorganized structure, and immune cell infiltration (punctate, grouped nuclear staining) (FIG. 12B). hDMDΔ52/mdx/Utrn het muscle displayed all of the markers of the dystrophic phenotype—reduction of muscle fibers, increased immune cell infiltration and increased apoptotic fibers (darker, enlarged fibers) (FIG. 12C). hDMDΔ52/mdx/Utrn KO muscle also displayed all of the markers of the dystrophic phenotype, with a noticeable reduction of muscle fibers, increased immune cell infiltration and more apoptotic fibers (darker, enlarged fibers) (FIG. 12D). Thus, demonstrating that loss of utrophin exacerbates muscle degeneration of hDMDΔ52/mdx mice.

[0222] Masson trichrome staining was performed to examine fibrosis in diaphragm muscle at 24 weeks of age. Control hDMD/mdx mice displayed normal muscle histology, consisting of little collagen deposition (blue) surrounding the muscle fibers (red) (FIG. 13A). Increased collagen deposition was observed in hDMDΔ52/mdx mice, replacing a significant portion of muscle mass (FIG. 13B). Fibrotic deposition was highly apparent in hDMDΔ52/mdx/Utrn het (FIG. 13C) and hDMDΔ52/mdx/Utrn KO (FIG. 13D) muscle, appearing to take over more than half of the diaphragm. These data indicate that loss of utrophin increases fibrotic deposition in hDMDΔ52/mdx muscle.

[0223] Serum creatine kinase (CK) was measured to assess the level of muscle degeneration in each mouse line at 24 weeks of age. Control hDMD/mdx serum contained low levels of CK, while hDMDΔ52/mdx and hDMDΔ52/mdx/Utrn KO mice contained higher levels of CK, indicative of muscle fiber damage (FIG. 14A). Utrophin-deficient mice exhibited common hallmarks of the dystrophic phenotype for body mass (FIG. 14B) and survival (FIG. 14C). Statistical analysis was performed using a t-test with Welch's correction to compare groups. Therefore, loss of utrophin increases serum biomarker of muscle damage. At 24 weeks, muscle mass was greatly reduced. There was less variability in the hDMDΔ52/mdx/Utrn KO mice overall. Also, many hDMDΔ52/mdx/Utrn KO mice died at this point.

### Example 5

### CRISPR/Cas9 Treatment of hDMDΔ52/mdx/Utrn KO Mice Restores Dystrophin Expression

[0224] Skilled artisans will appreciate that changes in genotype and/or phenotype observed in humanized mouse models of DMD can be predictive of changes in genotype and/or phenotype in human patients treated with the compositions and methods of the present disclosure. In particular, a method or composition that is efficacious in rescuing a disease (or disease-like) genotype or phenotype in a humanized mouse model can be readily adapted by those of skill in the art to therapeutic use in human subjects, and such adaptations are within the scope of the present disclosure.

[0225] Neonates and adults were injected to test effect of CRISPR/Cas9 treatment on pathology and phenotypic rescue in Utrn deficient lines and compare the phenotypic improvements in treated Utrn deficient mice (FIG. 15). Neonatal Utrn hets and Utrn KOs were treated with 7.5×10¹¹ total vector genomes of either the AAV9-ROSA26 control or AAV9-ΔExon 51 via temporal vein injection. Adult Utrn KOs were treated with 4×10¹² total vector genomes of either the AAV9-ROSA26 control or AAV9-ΔExon 51 via tail vein injection. FIG. 19A shows muscle from the age-matched hDMD/mdx wild-type control for comparison to Utrn KO mice treated as adults with AAV9-ROSA26 control (FIG. 19B) or AAV9-ΔExon 51 (FIG. 19C). The gRNAs are shown in TABLE 5, wherein the sequences shown are those of the DNA target the gRNA binds and targets.

TABLE 5

| Name | Description | Sequence |
|---|---|---|
| JCR179 | Intron 50 guide | AACACACAGCTGGGTTATCAGAG |
| | | (SEQ ID NO: 53) |
| JCR183 | Intron 51 guide | GAACTGGTGGGAAATGGTCTAG |
| | | (SEQ ID NO: 54) |

[0226] After CRISPR treatment, deletion PCR of genomic DNA was performed to determine if Exon 51 deletion was achieved (FIG. 16, top). Compared to the controls, CRISPR-ΔExon 51 treatment resulted in excision of exon 51 in both hDMDΔ52/mdx/Utrn het and hDMDΔ52/mdx/Utrn KO mice. Western blotting was performed to measure dystrophin expression in treated mice (FIG. 16, bottom). Dystrophin expression was apparent in both mouse lines after treatment with CRISPR-ΔExon 51.

[0227] After CRISPR treatment, immunofluorescent staining was performed. Compared to the controls, CRISPR-ΔExon 51 treatment resulted in restoration of dystrophin (red) in the muscles of both hDMDΔ52/mdx/Utrn het and hDMDΔ52/mdx/Utrn KO mice (FIG. 17A, FIG. 17B, FIG. 18A, and FIG. 18B). CRISPR-ΔExon 51 treatment also resulted in reduced serum creatine kinasae (CK) in both hDMDΔ52/mdx/Utrn het and hDMDΔ52/mdx/Utrn KO mice (FIG. 18C). Confirmation of dystrophin restoration coupled with the functional aspects of hDMDΔ52/mdx/Utrn KO mice led us to continue our studies in these mice. Adult mice hDMDΔ52/mdx/Utrn KO mice were treated at 8 weeks of age with a control vector or CRISPR-ΔExon 51 (FIG. 19A, FIG. 19B, FIG. 19C, and FIG. 19D). Immunofluorescent staining of the tibialis anterior muscle at 16 weeks post-treatment revealed widespread dystrophin staining in CRISPR-ΔExon 51-treated mice (FIG. 19C). Dystrophin positive fibers were also quantified (FIG. 19D). Exon 51 deletion improved survival (FIG. 19E) and motor function (FIG. 19F) in Utrn KO mice.

[0228] The foregoing description of the specific aspects will so fully reveal the general nature of the invention that others can, by applying knowledge within the skill of the art, readily modify and/or adapt for various applications such specific aspects, without undue experimentation, without departing from the general concept of the present disclosure. Therefore, such adaptations and modifications are intended to be within the meaning and range of equivalents of the disclosed aspects, based on the teaching and guidance presented herein. It is to be understood that the phraseology or terminology herein is for the purpose of description and not of limitation, such that the terminology or phraseology of the present specification is to be interpreted by the skilled artisan in light of the teachings and guidance.

[0229] The breadth and scope of the present disclosure should not be limited by any of the above-described exemplary aspects, but should be defined only in accordance with the following claims and their equivalents.

[0230] All publications, patents, patent applications, and/or other documents cited in this application are incorporated by reference in their entirety for all purposes to the same extent as if each individual publication, patent, patent application, and/or other document were individually indicated to be incorporated by reference for all purposes.

[0231] For reasons of completeness, various aspects of the invention are set out in the following numbered clauses:

[0232] Clause 1. A method of screening for a pair of gRNA molecules for editing a genomic nucleic acid in a subject, the method comprising: (a) generating a plurality of pairs of gRNA molecules, each pair comprising a first gRNA and a second gRNA, wherein the first gRNA targets a first nucleic acid sequence and the second gRNA targets a second nucleic acid sequence; (b) expressing a Cas9 protein or a fusion protein comprising the Cas9 protein, and the plurality of pairs of gRNA molecules in a plurality of cells, wherein one pair of gRNA molecules is expressed in a cell, and wherein the first gRNA directs the Cas9 protein or fusion protein to cut the first nucleic acid sequence and the second gRNA directs the Cas9 protein or fusion protein to cut the second nucleic acid sequence.

[0233] Clause 2. The method of clause 1, wherein expressing the Cas9 protein or the fusion protein comprising the Cas9 protein, and the plurality of pairs of gRNA molecules in the plurality of cells, wherein one pair of gRNA molecules is expressed in a cell, and wherein the first gRNA directs the Cas9 protein or fusion protein to cut the first nucleic acid sequence and the second gRNA directs the Cas9 protein or fusion protein to cut the second nucleic acid sequence in step (b), thereby forms an excised nucleic acid and a new junction in the genomic nucleic acid.

[0234] Clause 3. The method of clause 2, wherein the excised nucleic acid is in-frame.

[0235] Clause 4. The method of any one of clauses 1-3, wherein the genomic nucleic acid comprises at least one exon of a dystrophin gene, wherein the first nucleic acid sequence comprises a first intron of the dystrophin gene and the second nucleic acid sequence comprises a second intron of the dystrophin gene, and wherein the first intron is adjacent to one side of the at least one exon and the second intron is adjacent to the other side of the at least one exon.

[0236] Clause 5. The method of clause 4, wherein the at least one exon is in between the first and second introns in the genomic nucleic acid.

[0237] Clause 6. The method of any one of clauses 1-5, wherein the genomic nucleic acid comprises two or more exons of a dystrophin gene, wherein the first nucleic acid sequence comprises a first intron of the dystrophin gene and the second nucleic acid sequence comprises a second intron of the dystrophin gene, and wherein the first intron is adjacent to one side of the two or more exons and the second intron is adjacent to the other side of the two or more exons.

[0238] Clause 7. The method of clause 6, wherein the two or more exons are in between the first and second introns in the genomic nucleic acid.

[0239] Clause 8. The method of any one of clauses 1-7, wherein the expression is effected by transfecting the plurality of cells with a plurality of vectors, wherein each cell is transfected with a first vector encoding one pair of gRNA molecules and a second vector encoding the Cas9 protein or fusion protein, wherein each cell is transfected with a different first vector encoding a different pair of gRNA molecules.

[0240] Clause 9. The method of clause 8, wherein the first vector and second vector are each a viral vector.

[0241] Clause 10. The method of clause 9, wherein the viral vector is a lentiviral vector, a AAV vector, or an adenoviral vector.

[0242] Clause 11. The method of any one of clauses 1-10, the method further comprising: (c) isolating the genomic nucleic acid from the plurality of cells; and/or (d) contacting the genomic nucleic acid with a first pool of probes, wherein one or more different probes specifically bind to each new junction and a portion of the first nucleic acid sequence; and/or (e) isolating the genomic nucleic acid bound to the first pool of probes; and/or (f) contacting the genomic nucleic acid bound to the first pool of probes with a second pool of probes, wherein one or more different probes specifically bind to each new junction and a portion of the second nucleic acid sequence; and/or (g) isolating the genomic nucleic acid bound to the first and second pools of probes; and/or (h) sequencing the isolated genomic nucleic acid bound to the first and second pools of probes; and/or (i) aligning the sequenced isolated genomic nucleic acid to identify the sequenced new junctions; and/or (j) assigning each sequenced new junction to the corresponding pair of gRNA molecules.

[0243] Clause 12. The method of clause 11, wherein step (i) comprises computationally aligning the sequences of the isolated genomic nucleic acid to identify the sequenced new junctions.

[0244] Clause 13. The method of clause 12 or 13, further comprising identifying the pair of gRNA molecules having a greater number of sequenced new junctions as the pair of gRNA molecules having greater efficiency.

[0245] Clause 14. The method of any one of clauses 11-13, wherein the probes each have a length of about 100 bp to about 140 bp.

[0246] Clause 15. The method of any one of clauses 1-14, wherein the excised nucleic acid comprises exon 51 of the dystrophin gene.

[0247] Clause 16. The method of any one of clauses 1-15, wherein the excised nucleic acid comprises exons 45-55 of the dystrophin gene.

[0248] Clause 17. The method of any one of clauses 1-15, wherein the first nucleic acid sequence is within intron 50 of the dystrophin gene.

[0249] Clause 18. The method of any one of clauses 1-15, wherein the second nucleic acid sequence is within intron 51 of the dystrophin gene.

[0250] Clause 19. The method of any one of clauses 1-16, wherein the first nucleic acid sequence is within intron 44 of the dystrophin gene.

[0251] Clause 20. The method of any one of clauses 1-16, wherein the second nucleic acid sequence is within intron 55 of the dystrophin gene.

[0252] Clause 21. The method of any one of clauses 1-20, wherein the probes are biotinylated probes.

[0253] Clause 22. A pair of gRNA molecules identified by the method of any one of the preceding clauses.

[0254] Clause 23. A CRISPR/Cas9 system comprising the pair of gRNA molecules of clause 22.

[0255] Clause 24. A gRNA molecule that binds and targets a polynucleotide sequence, and wherein the gRNA molecule binds or is encoded by a polynucleotide comprising a sequence selected from SEQ ID NOs: 55-78, or wherein the gRNA molecule comprises a polynucleotide sequence selected from SEQ ID NOs: 79-102.

[0256] Clause 25. A transgenic mouse whose genome comprises: a mutation in the mouse dystrophin gene: a mutant human dystrophin gene on chromosome 5; and a mutation in the mouse utrophin gene.

[0257] Clause 26. The mouse of clause 25, wherein the mutation in the mouse dystrophin gene comprises an insertion or deletion in the mouse dystrophin gene that prevents protein expression from the mouse dystrophin gene.

[0258] Clause 27. The mouse of clause 26, wherein the mutation in the mouse dystrophin gene comprises a premature stop codon in exon 23 of the mouse dystrophin gene.

[0259] Clause 28. The mouse of any one of clauses 25-27, wherein the mutant human dystrophin gene has at least one exon deleted.

[0260] Clause 29. The mouse of any one of clauses 25-28, wherein the mutant human dystrophin gene has exon 52 deleted.

[0261] Clause 30. The mouse of any one of clauses 25-29, wherein the mutation in the mouse utrophin gene is a functional deletion of the mouse utrophin gene.

[0262] Clause 31. The mouse of any one of clauses 25-29, wherein the mutation in the mouse utrophin gene comprises an insertion or deletion in the mouse utrophin gene that prevents protein expression from the mouse utrophin gene.

[0263] Clause 32. The mouse of clause 31, wherein the mutation in the mouse utrophin gene comprises an insertion in exon 7 of the mouse utrophin gene.

[0264] Clause 33. The mouse of any one of clauses 25-29, wherein the mutation in the mouse utrophin gene comprises a deletion of the entire mouse utrophin gene.

[0265] Clause 34. The mouse of any one of clauses 25-33, wherein the mouse is heterozygous for the mutation in the mouse utrophin gene.

[0266] Clause 35. The mouse of any one of clauses 25-33, wherein the mouse is homozygous for the mutation in the mouse utrophin gene.

[0267] Clause 36. The mouse of any one of clauses 25-35, wherein the mouse has reduced life span, reduced body mass, reduced body strength, reduced motor coordination, reduced balance, and/or reduced forelimb strength as compared to a wild-type mouse.

[0268] Clause 37. The mouse of any one of clauses 25-35, wherein the mouse has reduced life span, reduced body mass, reduced body strength, reduced motor coordination, reduced balance, and/or reduced forelimb strength as compared to a control mouse whose genome comprises a wild-type utrophin gene and a mutation in the mouse dystrophin gene.

[0269] Clause 38. The mouse of any one of clauses 25-35, wherein the mouse has reduced lifespan, reduced body mass, reduced body strength, reduced motor coordination, reduced balance, and/or reduced forelimb strength as compared to a control mouse whose genome comprises a wild-type utrophin gene, a mutation in the mouse dystrophin gene, and a mutant human dystrophin gene.

[0270] Clause 39. The mouse of any of clauses 25-38, wherein the mouse has increased muscle damage as compared to (i) a wild-type mouse, (ii) a control mouse whose genome comprises a wild-type utrophin gene and a mutation in the mouse dystrophin gene, and/or (iii) a control mouse whose genome comprises a wild-type utrophin gene, a mutation in the mouse dystrophin gene, and a mutant human dystrophin gene.

[0271] Clause 40. The mouse of clause 39, wherein the muscle damage comprises one or more of degeneration of the muscle, fibrosis of the muscle, and elevated serum creatine kinase.

[0272] Clause 41. The mouse of any one of clauses 25-40, wherein the mouse does not exhibit detectable dystrophin protein in heart or skeletal muscle.

[0273] Clause 42. The mouse of any one of clauses 25-41, wherein the mouse is a hDMDΔ52/mdx/Utrn KO mouse.

[0274] Clause 43. An isolated cell or biological material obtained from the mouse of any one of clauses 25-42.

[0275] Clause 44. The biological material of clause 43, comprising a protein, a lipid, a nucleotide, fat, muscle, or a tissue.

[0276] Clause 45. A method of correcting a dystrophin gene mutation, the method comprising administering to the mouse of any one of clauses 25-42 a CRISPR/Cas9 gene editing composition.

[0277] Clause 46. The method of clause 45, wherein the CRISPR/Cas9 gene editing composition comprises: (a) at least one guide RNA (gRNA) targeting the mutant human dystrophin gene; and (b) a Cas9 protein or a fusion protein comprising the Cas9 protein.

[0278] Clause 47. The method of clause 46, wherein the CRISPR/Cas9 gene editing composition comprises a first gRNA and a second gRNA, and wherein the first gRNA and the second gRNA are configured to form a first and a second double strand break in a first and a second intron flanking exon 51 of the mutant human dystrophin gene, respectively, thereby deleting exon 51.

[0279] Clause 48. The method of clause 47, wherein the CRISPR/Cas9 gene editing composition comprises a first gRNA and a second gRNA, and wherein the first gRNA and the second gRNA are configured to form a first and a second double strand break in a first and a second intron flanking exons 45-55 of the mutant human dystrophin gene, respectively, thereby deleting exons 45-55.

[0280] Clause 49. The method of any one of clauses 45-48, wherein the dystrophin gene mutation is corrected in a cell of the mouse, and wherein the cell is a muscle cell, a satellite cell, or an iPSC/iCM.

[0281] Clause 50. The method of any one of clauses 45-49, wherein the correction restores the reading frame of the human dystrophin gene.

[0282] Clause 51. The method of any one of clauses 45-50, wherein the correction results in expression of an at least partially functional human dystrophin protein.

[0283] Clause 52. A gamete produced by the mouse of any one of clauses 25-42.

[0284] Clause 53. The gamete of clause 52, wherein the gamete does not encode a functional mouse dystrophin protein or a functional mouse utrophin protein.

[0285] Clause 54. An isolated mouse cell, or a progeny cell thereof, isolated from the mouse of any one of clauses 25-42.

[0286] Clause 55. A primary cell culture or a secondary cell line derived from the mouse of any one of clauses 25-42.

[0287] Clause 56. A tissue or organ explant or culture thereof, derived from the mouse of any one of clauses 25-42

[0288] Clause 57. A method of screening therapeutic agents for treating Duchenne muscular dystrophy (DMD), the method comprising administering to the mouse of any one of clauses 25-42 one or more therapeutic agents.

[0289] Clause 58. The method of clause 57, wherein the one or more therapeutic agents comprises a small molecule, anti-sense RNA, vector, CRISPR/Cas gene editing system, or biological agent, or a combination thereof.

[0290] Clause 59. The method of clause 58, wherein the vector is a viral vector encoding a gene of interest.

[0291] Clause 60. The method of clause 59, wherein the viral vector is an AAV vector.

[0292] Clause 61. The method of any one of clauses 57-60, wherein the mouse after administration of the one or more therapeutic agents exhibits increased lifespan, reduced body mass, increased body strength, increased motor coordination, increased balance, increased forelimb strength, reduced muscle injury, and/or reduced CK level compared to before administration of the one or more therapeutic agents.

[0293] Clause 62. The method of any one of clauses 57-61, wherein the mouse after administration of the one or more therapeutic agents exhibits increased expression of a dystrophin gene as compared to before administration of the one or more therapeutic agents.

[0294] Clause 63. The method of clause 62, wherein the dystrophin gene is a truncated human dystrophin gene.

[0295] Clause 64. The method of clause 63, wherein the truncated human dystrophin gene comprises a plurality of deletions relative to a wild-type human dystrophin gene, and wherein at least one of the deletions is in exon 52.

SEQUENCES

SEQ ID NO: 1
NRG (N can be any nucleotide residue, e.g., any of A, G, C, or T)
SEQ ID NO: 2
NGG (N can be any nucleotide residue, e.g., any of A, G, C, or T)
SEQ ID NO: 3
NAG (N can be any nucleotide residue, e.g., any of A, G, C, or T)
SEQ ID NO: 4
NGGNG (N can be any nucleotide residue, e.g., any of A, G, C, or T)
SEQ ID NO: 5
NNAGAAW (W = A or T; N can be any nucleotide residue, e.g., any of A, G, C, or T)
SEQ ID NO: 6
NAAR (R = A or G; N can be any nucleotide residue, e.g., any of A, G, C, or T)
SEQ ID NO: 7
NNGRR (R = A or G; N can be any nucleotide residue, e.g., any of A, G, C, or T)
SEQ ID NO: 8
NNGRRN (R = A or G; N can be any nucleotide residue, e.g., any of A, G, C, or T)
SEQ ID NO: 9
NNGRRT (R = A or G; N can be any nucleotide residue, e.g., any of A, G, C, or T)
SEQ ID NO: 10
NNGRRV (R = A or G; N can be any nucleotide residue, e.g., any of A, G, C, or T)
SEQ ID NO: 11
NNNNGATT (N can be any nucleotide residue, e.g., any of A, G, C, or T)
SEQ ID NO: 12
NNNNGNNN (N can be any nucleotide residue, e.g., any of A, G, C, or T)
SEQ ID NO: 13
NGA (N can be any nucleotide residue, e.g., any of A, G, C, or T)
SEQ ID NO: 14
NNNRRT (R = A or G; N can be any nucleotide residue, e.g., any of A, G, C, or T)
SEQ ID NO: 15
ATTCCT
SEQ ID NO: 16
NGAN (N can be any nucleotide residue, e.g., any of A, G, C, or T)
SEQ ID NO: 17
NGNG (N can be any nucleotide residue, e.g., any of A, G, C, or T)
SEQ ID NO: 18
Streptococcus pyogenes Cas9 protein
MDKKYSIGLDIGTNSVGWAVITDEYKVPSKKFKVLGNTDRHSIKKNLIGALLFDSGETAEATRLKRTA
RRRYTRRKNRICYLQEIFSNEMAKVDDSFFHRLEESFLVEEDKKHERHPIFGNIVDEVAYHEKYPTIY
HLRKKLVDSTDKADLRLIYLALAHMIKERGHFLIEGDLNPDNSDVDKLFIQLVQTYNQLFEENPINAS
GVDAKAILSARLSKSRRLENLIAQLPGEKKNGLFGNLIALSLGLTPNFKSNFDLAEDAKLQLSKDTYD
DDLDNLLAQIGDQYADLFLAAKNLSDAILLSDILRVNTEITKAPLSASMIKRYDEHHQDLTLLKALVR
QQLPEKYKEIFFDQSKNGYAGYIDGGASQEEFYKFIKPILEKMDGTEELLVKLNREDLLRKQRTFDNG
SIPHQIHLGELHAILRRQEDFYPFLKDNREKIEKILTFRIPYYVGPLARGNSRFAWMTRKSEETITPW
NFEEVVDKGASAQSFIERMTNFDKNLPNEKVLPKHSLLYEYFTVYNELTKVKYVTEGMRKPAFLSGEQ
KKAIVDLLEKTNRKVTVKQLKEDYFKKIECFDSVEISGVEDRENASLGTYHDLLKIIKDKDELDNEEN
EDILEDIVLTLTLFEDREMIEERLKTYAHLEDDKVMKQLKERRYTGWGRLSRKLINGIRDKQSGKTIL
DELKSDGFANRNEMQLIHDDSLTFKEDIQKAQVSGQGDSLHEHIANLAGSPAIKKGILQTVKVVDELV
KVMGRHKPENIVIEMARENQTTQKGQKNSRERMKRIEEGIKELGSQILKEHPVENTQLQNEKLYLYYL
QNGRDMYVDQELDINRLSDYDVDHIVPQSFLKDDSIDNKVLTRSDKNRGKSDNVPSEEVVKKMKNYWR
QLINAKLITQRKEDNLTKAERGGLSELDKAGFIKRQLVETRQITKHVAQILDSRMNTKYDENDKLIRE
VKVITLKSKLVSDERKDFQFYKVREINNYHHAHDAYLNAVVGTALIKKYPKLESEFVYGDYKVYDVRK
MIAKSEQEIGKATAKYFFYSNIMNFFKTEITLANGEIRKRPLIETNGETGEIVWDKGRDFATVRKVLS
MPQVNIVKKTEVQTGGFSKESILPKRNSDKLIARKKDWDPKKYGGFDSPTVAYSVLVVAKVEKGKSKK
LKSVKELLGITIMERSSFEKNPIDFLEAKGYKEVKKDLIIKLPKYSLFELENGRKRMLASAGELQKGN
ELALPSKYVNFLYLASHYEKLKGSPEDNEQKQLFVEQHKHYLDEIIEQISEFSKRVILADANLDKVLS
AYNKHRDKPIREQAENIIHLFTLTNLGAPAAFKYFDTTIDRKRYTSTKEVLDATLIHQSITGLYETRI
DLSQLGGD
SEQ ID NO: 19
Staphylococcus aureus Cas9 protein
MKRNYILGLDIGITSVGYGIIDYETRDVIDAGVRLFKEANVENNEGRRSKRGARRLKRRRRHRIQRVK
KLLFDYNLLTDHSELSGINPYEARVKGLSQKLSEEEFSAALLHLAKRRGVHNVNEVEEDTGNELSTKE
QISRNSKALEEKYVAELQLERLKKDGEVRGSINRFKTSDYVKEAKQLLKVQKAYHQLDQSFIDTYIDL
LETRRTYYEGPGEGSPFGWKDIKEWYEMLMGHCTYFPEELRSVKYAYNADLYNALNDLNNLVITRDEN
EKLEYYEKFQIIENVFKQKKKPTLKQIAKEILVNEEDIKGYRVTSTGKPEFTNLKVYHDIKDITARKE
TIENAELLDQIAKILTIYQSSEDIQEELININSELTQEEIEQISNLKGYTGTHNLSLKAINLILDELW
HTNDNQIAIFNRLKLVPKKVDLSQQKEIPTTLVDDFILSPVVKRSFIQSIKVINAIIKKYGLPNDIII
ELAREKNSKDAQKMINEMQKRNRQTNERIEEIIRTTGKENAKYLIEKIKLHDMQEGKCLYSLEAIPLE
DLLNNPFNYEVDHIIPRSVSEDNSENNKVLVKQEENSKKGNRTPFQYLSSSDSKISYETFKKHILNLA
KGKGRISKTKKEYLLEERDINRESVQKDEINENLVDTRYATRGLMNLLRSYFRVNNLDVKVKSINGGF
ISFLRRKWKFKKERNKGYKHHAEDALIIANADFIFKEWKKLDKAKKVMENQMFEEKQAESMPEIETEQ
EYKEIFITPHQIKHIKDFKDYKYSHRVDKKPNRELINDTLYSTRKDDKGNTLIVNNLNGLYDKDNDKL
KKLINKSPEKLLMYHHDPQTYQKLKLIMEQYGDEKNPLYKYYEETGNYLTKYSKKDNGPVIKKIKYYG
NKLNAHLDITDDYPNSRNKVVKLSLKPYRFDVYLDNGVYKEVTVKNLDVIKKENYYEVNSKCYEEAKK
LKKISNQAEFIASFYNNDLIKINGELYRVIGVNNDLLNRIEVNMIDITYREYLENMNDKRPPRIIKTI
ASKTQSIKKYSTDILGNLYEVKSKKHPQIIKKG
SEQ ID NO: 20
Streptococcus pyogenes Cas9 amino acid sequence (with D10A)
MDKKYSIGLAIGTNSVGWAVITDEYKVPSKKFKVLGNTDRHSIKKNLIGALLFDSGETAEATRLKRTA
RRRYTRRKNRICYLQEIFSNEMAKVDDSFFHRLEESFLVEEDKKHERHPIFGNIVDEVAYHEKYPTIY
HLRKKLVDSTDKADLRLIYLALAHMIKFRGHFLIEGDLNPDNSDVDKLFIQLVQTYNQLFEENPINAS
GVDAKAILSARLSKSRRLENLIAQLPGEKKNGLFGNLIALSLGLTPNFKSNFDLAEDAKLQLSKDTYD
DDLDNLLAQIGDQYADLFLAAKNLSDAILLSDILRVNTEITKAPLSASMIKRYDEHHQDLTLLKALVR
QQLPEKYKEIFFDQSKNGYAGYIDGGASQEEFYKFIKPILEKMDGTEELLVKLNREDLLRKQRTFDNG
SIPHQIHLGELHAILRRQEDFYPFLKDNREKIEKILTFRIPYYVGPLARGNSRFAWMTRKSEETITPW
NFEEVVDKGASAQSFIERMTNFDKNLPNEKVLPKHSLLYEYFTVYNELTKVKYVTEGMRKPAFLSGEQ
KKAIVDLLEKTNRKVTVKQLKEDYFKKIECFDSVEISGVEDRENASLGTYHDLLKIIKDKDFLDNEEN
EDILEDIVLTLTLFEDREMIEERLKTYAHLFDDKVMKQLKRRRYTGWGRLSRKLINGIRDKQSGKTIL
DFLKSDGFANRNFMQLIHDDSLTFKEDIQKAQVSGQGDSLHEHIANLAGSPAIKKGILQTVKVVDELV
KVMGRHKPENIVIEMARENQTTQKGQKNSRERMKRIEEGIKELGSQILKEHPVENTQLQNEKLYLYYL
QNGRDMYVDQELDINRLSDYDVDHIVPQSFLKDDSIDNKVLTRSDKNRGKSDNVPSEEVVKKMKNYWR
QLLNAKLITQRKEDNLTKAERGGLSELDKAGFIKRQLVETRQITKHVAQILDSRMNTKYDENDKLIRE
VKVITLKSKLVSDFRKDFQFYKVREINNYHHAHDAYLNAVVGTALIKKYPKLESEFVYGDYKVYDVRK
MIAKSEQEIGKATAKYFFYSNIMNFFKTEITLANGEIRKRPLEITNGETGEIVWDKGRDFATVRKVLS
MPQVNIVKKTEVQTGGFSKESILPKRNSDKLIARKKDWDPKKYGGFDSPTVAYSVLVVAKVEKGKSKK
LKSVKELLGITIMERSSFEKNPIDFLEAKGYKEVKKDLIIKLPKYSLFELENGRKRMLASAGELQKGN
ELALPSKYVNFLYLASHYEKLKGSPEDNEQKQLFVEQHKHYLDEIIEQISEFSKRVILADANLDKVLS
AYNKHRDKPIREQAENIIHLFTLTNLGAPAAFKYFDTTIDRKRYTSTKEVLDATLIHQSITGLYETRI
DLSQLGGD
SEQ ID NO: 21
Streptococcus pyogenes Cas9 amino acid sequence (with D10A, H849A)
MDKKYSIGLAIGTNSVGWAVITDEYKVPSKKFKVLGNTDRHSIKKNLIGALLFDSGETAEATRLKRTA
RRRYTRRKNRICYLQEIFSNEMAKVDDSFFHRLEESFLVEEDKKHERHPIFGNIVDEVAYHEKYPTIY
HLRKKLVDSTDKADLRLIYLALAHMIKFRGHFLIEGDLNPDNSDVDKLFIQLVQTYNQLFEENPINAS
GVDAKAILSARLSKSRRLENLIAQLPGEKKNGLFGNLIALSLGLTPNFKSNFDLAEDAKLQLSKDTYD
DDLDNLLAQIGDQYADLFLAAKNLSDAILLSDILRVNTEITKAPLSASMIKRYDEHHQDLTLLKALVR
QQLPEKYKEIFFDQSKNGYAGYIDGGASQEEFYKFIKPILEKMDGTEELLVKLNREDLLRKQRTFDNG
SIPHQIHLGELHAILRRQEDFYPFLKDNREKIEKILTFRIPYYVGPLARGNSRFAWMTRKSEETITPW
NFEEVVDKGASAQSFIERMTNFDKNLPNEKVLPKHSLLYEYFTVYNELTKVKYVTEGMRKPAFLSGEQ
KKAIVDLLEKTNRKVTVKQLKEDYFKKIECFDSVEISGVEDRENASLGTYHDLLKIIKDKDFLDNEEN
EDILEDIVITLTLFEDREMIEERLKTYAHLEDDKVMKQLKRRRYTGWGRLSRKLINGIRDKQSGKTIL
DELKSDGFANRNFMQLIHDDSLTFKEDIQKAQVSGQGDSLHEHIANLAGSPAIKKGILQTVKVVDELV
KVMGRHKPENIVIEMARENQTTQKGQKNSRERMKRIEEGIKELGSQILKEHPVENTQLQNEKLYLYYL
QNGRDMYVDQELDINRLSDYDVDAIVPQSFLKDDSIDNKVLTRSDKNRGKSDNVPSEEVVKKMKNYWR
QLLNAKLITQRKFDNLTKAERGGLSELDKAGFIKRQLVETRQITKHVAQILDSRMNTKYDENDKLIRE
VKVITLKSKLVSDFRKDFQFYKVREINNYHHAHDAYLNAVVGTALIKKYPKLESEFVYGDYKVYDVRK
MIAKSEQEIGKATAKYFFYSNIMNFFKTEITLANGEIRKRPLIETNGETGEIVWDKGRDFATVRKVLS
MPQVNIVKKTEVQTGGFSKESILPKRNSDKLIARKKDWDPKKYGGFDSPTVAYSVLVVAKVEKGKSKK
LKSVKELLGITIMERSSFEKNPIDFLEAKGYKEVKKDLIIKLPKYSLFELENGRKRMLASAGELQKGN
ELALPSKYVNFLYLASHYEKLKGSPEDNEQKQLEVEQHKHYLDEIIEQISEFSKRVILADANLDKVLS
AYNKHRDKPIREQAENIIHLFTLTNLGAPAAFKYFDTTIDRKRYTSTKEVLDATLIHQSITGLYETRI
DLSQLGGD
SEQ ID NO: 22
Polynucleotide sequence of D10A mutant of S. aureus Cas9
atgaaaagga actacattct ggggctggcc atcgggatta caagcgtggg gtatgggatt
attgactatg aaacaaggga cgtgatcgac gcaggcgtca gactgttcaa ggaggccaac
gtggaaaaca atgagggacg gagaagcaag aggggagcca ggcgcctgaa acgacggaga
aggcacagaa tccagagggt gaagaaactg ctgttcgatt acaacctgct gaccgaccat
tctgagctga gtggaattaa tccttatgaa gccagggtga aaggcctgag tcagaagctg
tcagaggaag agttttccgc agctctgctg cacctggcta agcgccgagg agtgcataac
gtcaatgagg tggaagagga caccggcaac gagctgtcta caaaggaaca gatctcacgc
aatagcaaag ctctggaaga gaagtatgtc gcagagctgc agctggaacg gctgaagaaa
gatggcgagg tgagagggtc aattaatagg ttcaagacaa gcgactacgt caaagaagcc
aagcagctgc tgaaagtgca gaaggcttac caccagctgg atcagagctt catcgatact
tatatcgacc tgctggagac tcggagaacc tactatgagg gaccaggaga agggagcccc
ttcggatgga aagacatcaa ggaatggtac gagatgctga tgggacattg cacctatttt
ccagaagagc tgagaagcgt caagtacgct tataacgcag atctgtacaa cgccctgaat
gacctgaaca acctggtcat caccagggat gaaaacgaga aactggaata ctatgagaag
ttccagatca tcgaaaacgt gtttaagcag aagaaaaagc ctacactgaa acagattgct
aaggagatcc tggtcaacga agaggacatc aagggctacc gggtgacaag cactggaaaa
ccagagttca ccaatctgaa agtgtatcac gatattaagg acatcacagc acggaaagaa
atcattgaga acgccgaact gctggatcag attgctaaga tcctgactat ctaccagagc
tccgaggaca tccaggaaga gctgactaac ctgaacagcg agctgaccca ggaagagatc
gaacagatta gtaatctgaa ggggtacacc ggaacacaca acctgtccct gaaagctatc
aatctgattc tggatgagct gtggcataca aacgacaatc agattgcaat ctttaaccgg
ctgaagctgg tcccaaaaaa ggtggacctg agtcagcaga aagagatccc aaccacactg
gtggacgatt tcattctgtc acccgtggtc aagcggagct tcatccagag catcaaagtg
atcaacgcca tcatcaagaa gtacggcctg cccaatgata tcattatcga gctggctagg
gagaagaaca gcaaggacgc acagaagatg atcaatgaga tgcagaaacg aaaccggcag
accaatgaac gcattgaaga gattatccga actaccggga aagagaacgc aaagtacctg
attgaaaaaa tcaagctgca cgatatgcag gagggaaagt gtctgtattc tctggaggcc
atccccctgg aggacctgct gaacaatcca ttcaactacg aggtcgatca tattatcccc
agaagcgtgt ccttcgacaa ttcctttaac aacaaggtgc tggtcaagca ggaagagaac
tctaaaaagg gcaataggac tcctttccag tacctgtcta gttcagattc caagatctct
tacgaaacct ttaaaaagca cattctgaat ctggccaaag gaaagggccg catcagcaag
accaaaaagg agtacctgct ggaagagcgg gacatcaaca gattctccgt ccagaaggat
tttattaacc ggaatctggt ggacacaaga tacgctactc gcggcctgat gaatctgctg
cgatcctatt tccgggtgaa caatctggat gtgaaagtca agtccatcaa cggcgggttc
acatcttttc tgaggcgcaa atggaagttt aaaaaggagc gcaacaaagg gtacaagcac
catgccgaag atgctctgat tatcgcaaat gccgacttca tctttaagga gtggaaaaag
ctggacaaag ccaagaaagt gatggagaac cagatgttcg aagagaagca ggccgaatct
atgcccgaaa tcgagacaga acaggagtac aaggagattt tcatcactcc tcaccagatc
aagcatatca aggatttcaa ggactacaag tactctcacc gggtggataa aaagcccaac
agagagctga tcaatgacac cctgtatagt acaagaaaag acgataaggg gaataccctg
attgtgaaca atctgaacgg actgtacgac aaagataatg acaagctgaa aaagctgatc
aacaaaagtc ccgagaagct gctgatgtac caccatgatc ctcagacata tcagaaactg
aagctgatta tggagcagta cggcgacgag aagaacccac tgtataagta ctatgaagag
actgggaact acctgaccaa gtatagcaaa aaggataatg gccccgtgat caagaagatc
aagtactatg ggaacaagct gaatgcccat ctggacatca cagacgatta ccctaacagt
cgcaacaagg tggtcaagct gtcactgaag ccatacagat tcgatgtcta tctggacaac
ggcgtgtata aatttgtgac tgtcaagaat ctggatgtca tcaaaaagga gaactactat
gaagtgaata gcaagtgcta cgaagaggct aaaaagctga aaaagattag caaccaggca
gagttcatcg cctcctttta caacaacgac ctgattaaga tcaatggcga actgtatagg
gtcatcgggg tgaacaatga tctgctgaac cgcattgaag tgaatatgat tgacatcact
taccgagagt atctggaaaa catgaatgat aagcgccccc ctcgaattat caaaacaatt
gcctctaaga ctcagagtat caaaaagtac tcaaccgaca ttctgggaaa cctgtatgag
gtgaagagca aaaagcaccc tcagattatc aaaaagggc
SEQ ID NO: 23
Polynucleotide sequence of N580A mutant of S. aureus Cas9
atgaaaagga actacattct ggggctggac atcgggatta caagcgtggg gtatgggatt
attgactatg aaacaaggga cgtgatcgac gcaggcgtca gactgttcaa ggaggccaac
gtggaaaaca atgagggacg gagaagcaag aggggagcca ggcgcctgaa acgacggaga
aggcacagaa tccagagggt gaagaaactg ctgttcgatt acaacctgct gaccgaccat
tctgagctga gtggaattaa tccttatgaa gccagggtga aaggcctgag tcagaagctg
tcagaggaag agttttccgc agctctgctg cacctggcta agcgccgagg agtgcataac
gtcaatgagg tggaagagga caccggcaac gagctgtcta caaaggaaca gatctcacgc
aatagcaaag ctctggaaga gaagtatgtc gcagagctgc agctggaacg gctgaagaaa
gatggcgagg tgagagggtc aattaatagg ttcaagacaa gcgactacgt caaagaagcc
aagcagctgc tgaaagtgca gaaggcttac caccagctgg atcagagctt catcgatact
tatatcgacc tgctggagac tcggagaacc tactatgagg gaccaggaga agggagcccc
ttcggatgga aagacatcaa ggaatggtac gagatgctga tgggacattg cacctatttt
ccagaagagc tgagaagcgt caagtacgct tataacgcag atctgtacaa cgccctgaat
gacctgaaca acctggtcat caccagggat gaaaacgaga aactggaata ctatgagaag
ttccagatca tcgaaaacgt gtttaagcag aagaaaaagc ctacactgaa acagattgct
aaggagatcc tggtcaacga agaggacatc aagggctacc gggtgacaag cactggaaaa
ccagagttca ccaatctgaa agtgtatcac gatattaagg acatcacagc acggaaagaa
atcattgaga acgccgaact gctggatcag attgctaaga tcctgactat ctaccagagc
tccgaggaca tccaggaaga gctgactaac ctgaacagcg agctgaccca ggaagagatc
gaacagatta gtaatctgaa ggggtacacc ggaacacaca acctgtccct gaaagctatc
aatctgattc tggatgagct gtggcataca aacgacaatc agattgcaat ctttaaccgg
ctgaagctgg tcccaaaaaa ggtggacctg agtcagcaga aagagatccc aaccacactg
gtggacgatt tcattctgtc acccgtggtc aagcggagct tcatccagag catcaaagtg
atcaacgcca tcatcaagaa gtacggcctg cccaatgata tcattatcga gctggctagg
gagaagaaca gcaaggacgc acagaagatg atcaatgaga tgcagaaacg aaaccggcag
accaatgaac gcattgaaga gattatccga actaccggga aagagaacgc aaagtacctg
attgaaaaaa tcaagctgca cgatatgcag gagggaaagt gtctgtattc tctggaggcc
atccccctgg aggacctgct gaacaatcca ttcaactacg aggtcgatca tattatcccc
agaagcgtgt ccttcgacaa ttcctttaac aacaaggtgc tggtcaagca ggaagaggcc
tctaaaaagg gcaataggac tcctttccag tacctgtcta gttcagattc caagatctct
tacgaaacct ttaaaaagca cattctgaat ctggccaaag gaaagggccg catcagcaag
accaaaaagg agtacctgct ggaagagcgg gacatcaaca gattctccgt ccagaaggat
tttattaacc ggaatctggt ggacacaaga tacgctactc gcggcctgat gaatctgctg
cgatcctatt tccgggtgaa caatctggat gtgaaagtca agtccatcaa cggcgggttc
acatcttttc tgaggcgcaa atggaagttt aaaaaggagc gcaacaaagg gtacaagcac
catgccgaag atgctctgat tatcgcaaat gccgacttca tctttaagga gtggaaaaag
ctggacaaag ccaagaaagt gatggagaac cagatgttcg aagagaagca ggccgaatct
atgcccgaaa tcgagacaga acaggagtac aaggagattt tcatcactcc tcaccagatc
aagcatatca aggatttcaa ggactacaag tactctcacc gggtggataa aaagcccaac
agagagctga tcaatgacac cctgtatagt acaagaaaag acgataaggg gaataccctg
attgtgaaca atctgaacgg actgtacgac aaagataatg acaagctgaa aaagctgatc
aacaaaagtc ccgagaagct gctgatgtac caccatgatc ctcagacata tcagaaactg
aagctgatta tggagcagta cggcgacgag aagaacccac tgtataagta ctatgaagag
actgggaact acctgaccaa gtatagcaaa aaggataatg gccccgtgat caagaagatc
aagtactatg ggaacaagct gaatgcccat ctggacatca cagacgatta ccctaacagt
cgcaacaagg tggtcaagct gtcactgaag ccatacagat tcgatgtcta tctggacaac
ggcgtgtata aatttgtgac tgtcaagaat ctggatgtca tcaaaaagga gaactactat
gaagtgaata gcaagtgcta cgaagaggct aaaaagctga aaaagattag caaccaggca
gagttcatcg cctcctttta caacaacgac ctgattaaga tcaatggcga actgtatagg
gtcatcgggg tgaacaatga tctgctgaac cgcattgaag tgaatatgat tgacatcact
taccgagagt atctggaaaa catgaatgat aagcgccccc ctcgaattat caaaacaatt
gcctctaaga ctcagagtat caaaaagtac tcaaccgaca ttctgggaaa cctgtatgag
gtgaagagca aaaagcaccc tcagattatc aaaaagggc
SEQ ID NO: 24
codon optimized polynucleotide encoding S. pyogenes Cas9
atggataaaa agtacagcat cgggctggac atcggtacaa actcagtggg gtgggccgtg
attacggacg agtacaaggt accctccaaa aaatttaaag tgctgggtaa cacggacaga
cactctataa agaaaaatct tattggagcc ttgctgttcg actcaggcga gacagccgaa
gccacaaggt tgaagcggac cgccaggagg cggtatacca ggagaaagaa ccgcatatgc
tacctgcaag aaatcttcag taacgagatg gcaaaggttg acgatagctt tttccatcgc
ctggaagaat cctttcttgt tgaggaagac aagaagcacg aacggcaccc catctttggc
aatattgtcg acgaagtggc atatcacgaa aagtacccga ctatctacca cctcaggaag
aagctggtgg actctaccga taaggcggac ctcagactta tttatttggc actcgcccac
atgattaaat ttagaggaca tttcttgatc gagggcgacc tgaacccgga caacagtgac
gtcgataagc tgttcatcca acttgtgcag acctacaatc aactgttcga agaaaaccct
ataaatgctt caggagtcga cgctaaagca atcctgtccg agcgcctctc aaaatctaga
agacttgaga atctgattgc tcagttgccc ggggaaaaga aaaatggatt gtttggcaac
ctgatcgccc tcagtctcgg actgacccca aatttcaaaa gtaacttcga cctggccgaa
gacgctaagc tccagctgtc caaggacaca tacgatgacg acctcgacaa tctgctggcc
cagattgggg atcagtacgc cgatctcttt ttggcagcaa agaacctgtc cgacgccatc
ctgttgagcg atatcttgag agtgaacacc gaaattacta aagcacccct tagcgcatct
atgatcaagc ggtacgacga gcatcatcag gatctgaccc tgctgaaggc tcttgtgagg
caacagctcc ccgaaaaata caaggaaatc ttctttgacc agagcaaaaa cggctacgct
ggctatatag atggtggggc cagtcaggag gaattctata aattcatcaa gcccattctc
gagaaaatgg acggcacaga ggagttgctg gtcaaactta acagggagga cctgctgcgg
aagcagcgga cctttgacaa cgggtctatc ccccaccaga ttcatctggg cgaactgcac
gcaatcctga ggaggcagga ggatttttat ccttttctta aagataaccg cgagaaaata
gaaaagattc ttacattcag gatcccgtac tacgtgggac ctctcgcccg gggcaattca
cggtttgcct ggatgacaag gaagtcagag gagactatta caccttggaa cttcgaagaa
gtggtggaca agggtgcatc tgcccagtct ttcatcgagc ggatgacaaa ttttgacaag
aacctcccta atgagaaggt gctgcccaaa cattctctgc tctacgagta ctttaccgtc
tacaatgaac tgactaaagt caagtacgtc accgagggaa tgaggaagcc ggcattcctt
agtggagaac agaagaaggc gattgtagac ctgttgttca agaccaacag gaaggtgact
gtgaagcaac ttaaagaaga ctactttaag aagatcgaat gttttgacag tctggaaatt
tcaggggttg aagaccgctt caatgcgtca ttggggactt accatgatct tctcaagatc
ataaaggaca aagacttcct ggacaacgaa gaaaatgagg atattctcga agacatcgtc
ctcaccctga ccctgttcga agacagggaa atgatagaag agcgcttgaa aacctatgcc
cacctcttcg acgataaagt tatgaagcag ctgaagcgca ggagatacac aggatgggga
agattgtcaa ggaagctgat caatggaatt agggataaac agagtggcaa gaccatactg
gatttcctca aatctgatgg cttcgccaat aggaacttca tccaactgat tcacgatgac
tctcttacct tcaaggagga cattcaaaag gctcaggtga gcgggcaggg agactccctt
catgaacaca tcgcgaattt ggcaggttcc cccgctatta aaaagggcat ccttcaaact
gtcaaggtgg tggatgaatt ggtcaaggta atgggcagac ataagccaga aaatattgtg
atcgagatgg cccgcgaaaa ccagaccaca cagaagggcc agaaaaatag tagagagcgg
atgaagagga tcgaggaggg catcaaagag ctgggatctc agattctcaa agaacacccc
gtagaaaaca cacagctgca gaacgaaaaa ttgtacttgt actatctgca gaacggcaga
gacatgtacg tcgaccaaga acttgatatt aatagactgt ccgactatga cgtagaccat
atcgtgcccc agtccttcct gaaggacgac tccattgata acaaagtctt gacaagaagc
gacaagaaca ggggtaaaag tgataatgtg cctagcgagg aggtggtgaa aaaaatgaag
aactactggc gacagctgct taatgcaaag ctcattacac aacggaagtt cgataatctg
acgaaagcag agagaggtgg cttgtctgag ttggacaagg cagggtttat taagcggcag
ctggtggaaa ctaggcagat cacaaagcac gtggcgcaga ttttggacag ccggatgaac
acaaaatacc acgaaaatga taaactgata cgagaggtca aagttatcac gctgaaaagc
aagctggtgt ccgattttcg gaaagacttc cagttctaca aagttcgcga gattaataac
taccatcatg ctcacgatgc gtacctgaac gctgttgtcg ggaccgcctt gataaagaag
tacccaaagc tggaatccga gttcgtatac ggggattaca aagtgtacga tgtgaggaaa
atgatagcca agtccgagca ggagattgga aaggccacag ctaagtactt cttttattct
aacatcatga atttttttaa gacggaaatt accctggcca acggagagat cagaaagcgg
ccccttatag agacaaatgg tgaaacaggt gaaatcgtct gggataaggg cagggatttc
gctactgtga ggaaggtgct gagtatgcca caggtaaata tcgtgaaaaa aaccgaagta
cagaccggag gattttccaa ggaaagcatt ttgcctaaaa gaaactcaga caagctcatc
gcccgcaaga aagattggga ccctaagaaa tacgggggat ttgactcacc caccgtagcc
tattctgtgc tggtggtagc taaggtggaa aaaggaaagt ctaagaagct gaagtccgtg
aaggaactct tcggaatcac tatcatggaa agatcatcct ttgaaaagaa ccctatcgat
ttcctggagg ctaagggtta caaggaggtc aagaaagacc tcatcattaa actgccaaaa
tactctctct tcgagctgga aaatggcagg aagagaatgt tggccagcgc cggagagctg
caaaagggaa acgagcttgc tctgccctcc aaatatgtta attttctcta tctcgcttcc
cactatgaaa agctgaaagg gtctcccgaa gataacgagc agaagcagct gttcgtcgaa
cagcacaagc actatctgga tgaaataatc gaacaaataa gcgagttcag caaaagggtt
atcctggcgg atgctaattt ggacaaagta ctgtctgctt ataacaagca ccgggataag
cctattaggg aacaagccga gaatataatt cacctcttta cactcacgaa tctcggagcc
cccgccgcct tcaaatactt tgatacgact atcgaccgga aacggtatac cagtaccaaa
gaggtcctcg atgccaccct catccaccag tcaattactg gcctgtacga aacacggatc
gacctctctc aactgggcgg cgactag
SEQ ID NO: 25
codon optimized nucleic acid sequences encoding S. aureus Cas9
atgaaaagga actacattct ggggctggac atcgggatta caagcgtggg gtatgggatt
attgactatg aaacaaggga cgtgatcgac gcaggcgtca gactgttcaa ggaggccaac
gtggaaaaca atgagggacg gagaagcaag aggggagcca ggcgcctgaa acgacggaga
aggcacagaa tccagagggt gaagaaactg ctgttcgatt acaacctgct gaccgaccat
tctgagctga gtggaattaa tccttatgaa gccagggtga aaggcctgag tcagaagctg
tcagaggaag agttttccgc agctctgctg cacctggcta agcgccgagg agtgcataac
gtcaatgagg tggaagagga caccggcaac gagctgtcta caaaggaaca gatctcacgc
aatagcaaag ctctggaaga gaagtatgtc gcagagctgc agctggaacg gctgaagaaa
gatggcgagg tgagagggtc aattaatagg ttcaagacaa gcgactacgt caaagaagcc
aagcagctgc tgaaagtgca gaaggcttac caccagctgg atcagagctt catcgatact
tatatcgacc tgctggagac tcggagaacc tactatgagg gaccaggaga agggagcccc
ttcggatgga aagacatcaa ggaatggtac gagatgctga tgggacattg cacctatttt
ccagaagagc tgagaagcgt caagtacgct tataacgcag atctgtacaa agccctgaat
gacctgaaca acctggtcat caccagggat gaaaacgaga aactggaata ctatgagaag
ttccagatca tcgaaaacgt gtttaagcag aagaaaaagc ctacactgaa acagattgct
aaggagatcc tggtcaacga agaggacatc aagggctacc gggtgacaag cactggaaaa
ccagagttca ccaatctgaa agtgtatcac gatattaagg acatcacagc acggaaagaa
atcattgaga acgccgaact gctggatcag attgctaaga tcctgactat ctaccagagc
tccgaggaca tccaggaaga gctgactaac ctgaacagcg agctgaccca ggaagagatc
gaacagatta gtaatctgaa ggggtacacc ggaacacaca acctgtccct gaaagctatc
aatctgattc tggatgagct gtggcataca aacgacaatc agattgcaat ctttaaccgg
ctgaagctgg tcccaaaaaa ggtggacctg agtcagcaga aagagatccc aaccacactg
gtggacgatt tcattctgtc acccgtggtc aagcggagct tcatccagag catcaaagtg
atcaacgcca tcatcaagaa gtacggcctg cccaatgata tcattatcga gctggctagg
gagaagaaca gcaaggacgc acagaagatg atcaatgaga tgcagaaacg aaaccggcag
accaatgaac gcattgaaga gattatccga actaccggga aagagaacgc aaagtacctg
attgaaaaaa tcaagctgca cgatatgcag gagggaaagt gtctgtattc tctggaggcc
tccccctgg aggacctgct gaacaatcca ttcaactacg aggtcgatca tattatcccc
agaagcgtgt ccttcgacaa ttcctttaac aacaaggtgc tggtcaagca ggaagagaac
tctaaaaagg gcaataggac tcctttccag tacctgtcta gttcagattc caagatctct
tacgaaacct ttaaaaagca cattctgaat ctggccaaag gaaagggccg catcagcaag
accaaaaagg agtacctgct ggaagagcgg gacatcaaca gattctccgt ccagaaggat
tttattaacc ggaatctggt ggacacaaga tacgctactc gcggcctgat gaatctgctg
cgatcctatt tccgggtgaa caatctggat gtgaaagtca agtccatcaa cggcgggttc
acatcttttc tgaggcgcaa atggaagttt aaaaaggagc gcaacaaagg gtacaagcac
catgccgaag atgctctgat tatcgcaaat gccgacttca tctttaagga gtggaaaaag
ctggacaaag ccaagaaagt gatggagaac cagatgttcg aagagaagca ggccgaatct
atgcccgaaa tcgagacaga acaggagtac aaggagattt tcatcactcc tcaccagatc
aagcatatca aggatttcaa ggactacaag tactctcacc gggtggataa aaagcccaac
agagagctga tcaatgacac cctgtatagt acaagaaaag acgataaggg gaataccctg
attgtgaaca atctgaacgg actgtacgac aaagataatg acaagctgaa aaagctgatc
aacaaaagtc ccgagaagct gctgatgtac caccatgatc ctcagacata tcagaaactg
aagctgatta tggagcagta cggcgacgag aagaacccac tgtataagta ctatgaagag
actgggaact acctgaccaa gtatagcaaa aaggataatg gccccgtgat caagaagatc
aagtactatg ggaacaagct gaatgcccat ctggacatca cagacgatta ccctaacagt
cgcaacaagg tggtcaagct gtcactgaag ccatacagat tcgatgtcta tctggacaac
ggcgtgtata aatttgtgac tgtcaagaat ctggatgtca tcaaaaagga gaactactat
gaagtgaata gcaagtgcta cgaagaggct aaaaagctga aaaagattag caaccaggca
gagttcatcg cctcctttta caacaacgac ctgattaaga tcaatggcga actgtatagg
gtcatcgggg tgaacaatga tctgctgaac cgcattgaag tgaatatgat tgacatcact
taccgagagt atctggaaaa catgaatgat aagcgccccc ctcgaattat caaaacaatt
gcctctaaga ctcagagtat caaaaagtac tcaaccgaca ttctgggaaa cctgtatgag
gtgaagagca aaaagcaccc tcagattatc aaaaagggc
SEQ ID NO: 26
codon optimized nucleic acid sequences encoding S. aureus Cas9
atgaagcgga actacatcct gggcctggac atcggcatca ccagcgtggg ctacggcatc
atcgactacg agacacggga cgtgatcgat gccggcgtgc ggctgttcaa agaggccaac
gtggaaaaca acgagggcag gcggagcaag agaggcgcca gaaggctgaa gcggcggagg
cggcatagaa tccagagagt gaagaagctg ctgttcgact acaacctgct gaccgaccac
agcgagctga gcggcatcaa cccctacgag gccagagtga agggcctgag ccagaagctg
agcgaggaag agttctctgc cgccctgctg cacctggcca agagaagagg cgtgcacaac
gtgaacgagg tggaagagga caccggcaac gagctgtcca ccaaagagca gatcagccgg
aacagcaagg ccctggaaga gaaatacgtg gccgaactgc agctggaacg gctgaagaaa
gacggcgaag tgcggggcag catcaacaga ttcaagacca gcgactacgt gaaagaagcc
aaacagctgc tgaaggtgca gaaggcctac caccagctgg accagagctt catcgacacc
tacatcgacc tgctggaaac ccggcggacc tactatgagg gacctggcga gggcagcccc
ttcggctgga aggacatcaa agaatggtac gagatgctga tgggccactg cacctacttc
cccgaggaac tgcggagcgt gaagtacgcc tacaacgccg acctgtacaa cgccctgaac
gacctgaaca atctcgtgat caccagggac gagaacgaga agctggaata ttacgagaag
ttccagatca tcgagaacgt gttcaagcag aagaagaagc ccaccctgaa gcagatcgcc
aaagaaatcc tcgtgaacga agaggatatt aagggctaca gagtgaccag caccggcaag
cccgagttca ccaacctgaa ggtgtaccac gacatcaagg acattaccgc ccggaaagag
attattgaga acgccgagct gctggatcag attgccaaga tcctgaccat ctaccagagc
agcgaggaca tccaggaaga actgaccaat ctgaactccg agctgaccca ggaagagatc
gagcagatct ctaatctgaa gggctatacc ggcacccaca acctgagcct gaaggccatc
aacctgatcc tggacgagct gtggcacacc aacgacaacc agatcgctat cttcaaccgg
ctgaagctgg tgcccaagaa ggtggacctg tcccagcaga aagagatccc caccaccctg
gtggacgact tcatcctgag ccccgtcgtg aagagaagct tcatccagag catcaaagtg
atcaacgcca tcatcaagaa gtacggcctg cccaacgaca tcattatcga gctggcccgc
gagaagaact ccaaggacgc ccagaaaatg atcaacgaga tgcagaagcg gaaccggcag
accaacgagc ggatcgagga aatcatccgg accaccggca aagagaacgc caagtacctg
atcgagaaga tcaagctgca cgacatgcag gaaggcaagt gcctgtacag cctggaagcc
atccctctgg aagatctgct gaacaacccc ttcaactatg aggtggacca catcatcccc
agaagcgtgt ccttcgacaa cagcttcaac aacaaggtgc tcgtgaagca ggaagaaaac
agcaagaagg gcaaccggac cccattccag tacctgagca gcagcgacag caagatcagc
tacgaaacct tcaagaagca catcctgaat ctggccaagg gcaagggcag aatcagcaag
accaagaaag agtatctgct ggaagaacgg gacatcaaca ggttctccgt gcagaaagac
ttcatcaacc ggaacctggt ggataccaga tacgccacca gaggcctgat gaacctgctg
cggagctact tcagagtgaa caacctggac gtgaaagtga agtccatcaa tggcggcttc
accagctttc tgcggcggaa gtggaagttt aagaaagagc ggaacaaggg gtacaagcac
cacgccgagg acgccctgat cattgccaac gccgatttca tcttcaaaga gtggaagaaa
ctggacaagg ccaaaaaagt gatggaaaac cagatgttcg aggaaaagca ggccgagagc
atgcccgaga tcgaaaccga gcaggagtac aaagagatct tcatcacccc ccaccagatc
aagcacatta aggacttcaa ggactacaag tacagccacc gggtggacaa gaagcctaat
agagagctga ttaacgacac cctgtactcc acccggaagg acgacaaggg caacaccctg
atcgtgaaca atctgaacgg cctgtacgac aaggacaatg acaagctgaa aaagctgtac
aacaagagcc ccgaaaagct gctgatgtac caccacgacc cccagaccta ccagaaactg
aagctgatta tggaacagta cggcgacgag aagaatcccc tgtacaagta ctacgaggaa
accgggaact acctgaccaa gtactccaaa aaggacaacg gccccgtgat caagaagatt
aagtattacg gcaacaaact gaacgcccat ctggacatca ccgacgacta ccccaacagc
agaaacaagg tcgtgaagct gtccctgaag ccctacagat tcgacgtgta cctggacaat
ggcgtgtaca agttcgtgac cgtgaagaat ctggatgtga tcaaaaaaga aaactactac
gaagtgaata gcaagtgcta tgaggaagct aagaagctga agaagatcag caaccaggcc
gagtttatcg cctccttcta caacaacgat ctgatcaaga tcaacggcga gctgtataga
gtgatcggcg tgaacaacga cctgctgaac cggatcgaag tgaacatgat cgacatcacc
taccgcgagt acctggaaaa catgaacgac aagaggcccc ccaggatcat taagacaatc
gcctccaaga cccagagcat taagaagtac agcacagaca ttctgggcaa cctgtatgaa
gtgaaatcta agaagcaccc tcagatcatc aaaaagggc
SEQ ID NO: 27
codon optimized nucleic acid sequence encoding S. aureus Cas9
atgaagcgca actacatcct cggactggac atcggcatta cctccgtggg atacggcatc
atcgattacg aaactaggga tgtgatcgac gctggagtca ggctgttcaa agaggcgaac
gtggagaaca acgaggggcg gcgctcaaag aggggggccc gccggctgaa gcgccgccgc
agacatagaa tccagcgcgt gaagaagctg ctgttcgact acaaccttct gaccgaccac
tccgaacttt ccggcatcaa cccatatgag gctagagtga agggattgtc ccaaaagctg
tccgaggaag agttctccgc cgcgttgctc cacctcgcca agcgcagggg agtgcacaat
gtgaacgaag tggaagaaga taccggaaac gagctgtcca ccaaggagca gatcagccgg
aactccaagg ccctggaaga gaaatacgtg gcggaactgc aactggagcg gctgaagaaa
gacggagaag tgcgcggctc gatcaaccgc ttcaagacct cggactacgt gaaggaggcc
aagcagctcc tgaaagtgca aaaggcctat caccaacttg accagtcctt tatcgatacc
tacatcgatc tgctcgagac tcggcggact tactacgagg gtccagggga gggctcccca
tttggttgga aggatattaa ggagtggtac gaaatgctga tgggacactg cacatacttc
cctgaggagc tgcggagcgt gaaatacgca tacaacgcag acctgtacaa cgcgctgaac
gacctgaaca atctcgtgat cacccgggac gagaacgaaa agctcgagta ttacgaaaag
ttccagatta ttgagaacgt gttcaaacag aagaagaagc cgacactgaa gcagattgcc
aaggaaatcc tcgtgaacga agaggacatc aagggctatc gagtgacctc aacgggaaag
ccggagttca ccaatctgaa ggtctaccac gacatcaaag acattaccgc ccggaaggag
atcattgaga acgcggagct gttggaccag attgcgaaga ttctgaccat ctaccaatcc
tccgaggata ttcaggaaga actcaccaac ctcaacagcg aactgaccca ggaggagata
gagcaaatct ccaacctgaa gggctacacc ggaactcata acctgagcct gaaggccatc
aacttgatcc tggacgagct gtggcacacc aacgataacc agatcgctat tttcaatcgg
ctgaagctgg tccccaagaa agtggacctc tcacaacaaa aggagatccc tactaccctt
gtggacgatt tcattctgtc ccccgtggtc aagagaagct tcatacagtc aatcaaagtg
atcaatgcca ttatcaagaa atacggtctg cccaacgaca ttatcattga gctcgcccgc
gagaagaact cgaaggacgc ccagaagatg attaacgaaa tgcagaagag gaaccgacag
actaacgaac ggatcgaaga aatcatccgg accaccggga aggaaaacgc gaagtacctg
atcgaaaaga tcaagctcca tgacatgcag gaaggaaagt gtctgtactc gctggaggcc
attccgctgg aggacttgct gaacaaccct tttaactacg aagtggatca tatcattccg
aggagcgtgt cattcgacaa ttccttcaac aacaaggtcc tcgtgaagca ggaggaaaac
tcgaagaagg gaaaccgcac gccgttccag tacctgagca gcagcgactc caagatttcc
tacgaaacct tcaagaagca catcctcaac ctggcaaagg ggaagggtcg catctccaag
accaagaagg aatatctgct ggaagaaaga gacatcaaca gattctccgt gcaaaaggac
ttcatcaacc gcaacctcgt ggatactaga tacgctactc ggggtctgat gaacctcctg
agaagctact ttagagtgaa caatctggac gtgaaggtca agtcgattaa cggaggtttc
acctccttcc tgcggcgcaa gtggaagttc aagaaggaac ggaacaaggg ctacaagcac
cacgccgagg acgccctgat cattgccaac gccgacttca tcttcaaaga atggaagaaa
cttgacaagg ctaagaaggt catggaaaac cagatgttcg aagaaaagca ggccgagtct
atgcctgaaa tcgagactga acaggagtac aaggaaatct ttattacgcc acaccagatc
aaacacatca aggatttcaa ggattacaag tactcacatc gcgtggacaa aaagccgaac
agggaactga tcaacgacac cctctactcc acccggaagg atgacaaagg gaataccctc
atcgtcaaca accttaacgg cctgtacgac aaggacaacg ataagctgaa gaagctcatt
aacaagtcgc ccgaaaagtt gctgatgtac caccacgacc ctcagactta ccagaagctc
aagctgatca tggagcagta tggggacgag aaaaacccgt tgtacaagta ctacgaagaa
actgggaatt atctgactaa gtactccaag aaagataacg gccccgtgat taagaagatt
aagtactacg gcaacaagct gaacgcccat ctggacatca ccgatgacta ccctaattcc
cgcaacaagg tcgtcaagct gagcctcaag ccctaccggt ttgatgtgta ccttgacaat
ggagtgtaca agttcgtgac tgtgaagaac cttgacgtga tcaagaagga gaactactac
gaagtcaact ccaagtgcta cgaggaagca aagaagttga agaagatctc gaaccaggcc
gagttcattg cctccttcta taacaacgac ctgattaaga tcaacggcga actgtaccgc
gtcattggcg tgaacaacga tctcctgaac cgcatcgaag tgaacatgat cgacatcact
taccgggaat acctggagaa tatgaacgac aagcgcccgc cccggatcat taagactatc
gcctcaaaga cccagtcgat caagaagtac agcaccgaca tcctgggcaa cctgtacgag
gtcaaatcga agaagcaccc ccagatcatc aagaaggga
SEQ ID NO: 28
codon optimized nucleic acid sequence encoding S. aureus Cas9
atggccccaaagaagaagcggaaggtcggtatccacggagtcccagcagccaagcggaactacatcct
gggcctggacatcggcatcaccagcgtgggctacggcatcatcgactacgagacacgggacgtgatcg
atgccggcgtgcggctgttcaaagaggccaacgtggaaaacaacgagggcaggcggagcaagagaggc
gccagaaggctgaagcggcggaggcggcatagaatccagagagtgaagaagctgctgttcgactacaa
cctgctgaccgaccacagcgagctgagcggcatcaacccctacgaggccagagtgaagggcctgagcc
agaagctgagcgaggaagagttctctgccgccctgctgcacctggccaagagaagaggcgtgcacaac
gtgaacgaggtggaagaggacaccggcaacgagctgtccaccagagagcagatcagccggaacagcaa
ggccctggaagagaaatacgtggccgaactgcagctggaacggctgaagaaagacggcgaagtgcggg
gcagcatcaacagattcaagaccagcgactacgtgaaagaagccaaacagctgctgaaggtgcagaag
gcctaccaccagctggaccagagcttcatcgacacctacatcgacctgctggaaacccggcggaccta
ctatgagggacctggcgagggcagccccttcggctggaaggacatcaaagaatggtacgagatgctga
tgggccactgcacctacttccccgaggaactgcggagcgtgaagtacgcctacaacgccgacctgtac
aacgccctgaacgacctgaacaatctcgtgatcaccagggacgagaacgagaagctggaatattacga
gaagttccagatcatcgagaacgtgttcaagcagaagaagaagcccaccctgaagcagatcgccaaag
aaatcctcgtgaacgaagaggatattaagggctacagagtgaccagcaccggcaagcccgagttcacc
aacctgaaggtgtaccacgacatcaaggacattaccgcccggaaagagattattgagaacgccgagct
gctggatcagattgccaagatcctgaccatctaccagagcagcgaggacatccaggaagaactgacca
atctgaactccgagctgacccaggaagagatcgagcagatctctaatctgaagggctataccggcacc
cacaacctgagcctgaaggccatcaacctgatcctggacgagctgtggcacaccaacgacaaccagat
cgctatcttcaaccggctgaagctggtgcccaagaaggtggacctgtcccagcagaaagagatcccca
ccaccctggtggacgacttcatcctgagccccgtcgtgaagagaagcttcatccagagcatcaaagtg
atcaacgccatcatcaagaagtacggcctgcccaacgacatcattatcgagctggcccgcgagaagaa
ctccaaggacgcccagaaaatgatcaacgagatgcagaagcggaaccggcagaccaacgagcggatcg
aggaaatcatccggaccaccggcaaagagaacgccaagtacctgatcgagaagatcaagctgcacgac
atgcaggaaggcaagtgcctgtacagcctggaagccatccctctggaagatctgctgaacaacccctt
caactatgaggtggaccacatcatccccagaagcgtgtccttcgacaacagcttcaacaacaaggtgc
tcgtgaagcaggaagaaaacagcaagaagggcaaccggaccccattccagtacctgagcagcagcgac
agcaagatcagctacgaaaccttcaagaagcacatcctgaatctggccaagggcaagggcagaatcag
caagaccaagaaagagtatctgctggaagaacgggacatcaacaggttctccgtgcagaaagacttca
tcaaccggaacctggtggataccagatacgccaccagaggcctgatgaacctgctgcggagctacttc
agagtgaacaacctggacgtgaaagtgaagtccatcaatggcggcttcaccagctttctgcggcggaa
gtggaagtttaagaaagagcggaacaaggggtacaagcaccacgccgaggacgccctgatcattgcca
acgccgatttcatcttcaaagagtggaagaaactggacaaggccaaaaaagtgatggaaaaccagatg
ttcgaggaaaggcaggccgagagcatgcccgagatcgaaaccgagcaggagtacaaagagatcttcat
caccccccaccagatcaagcacattaaggacttcaaggactacaagtacagccaccgggtggacaaga
agcctaatagagagctgattaacgacaccctgtactccacccggaaggacgacaagggcaacaccctg
atcgtgaacaatctgaacggcctgtacgacaaggacaatgacaagctgaaaaagctgatcaacaagag
ccccgaaaagctgctgatgtaccaccacgacccccagacctaccagaaactgaagctgattatggaac
agtacggcgacgagaagaatcccctgtacaagtactacgaggaaaccgggaactacctgaccaagtac
tccaaaaaggacaacggccccgtgatcaagaagattaagtattacggcaacaaactgaacgcccatct
ggacatcaccgacgactaccccaacagcagaaacaaggtcgtgaagctgtccctgaagccctacagat
tcgacgtgtacctggacaatggcgtgtacaagttcgtgaccgtgaagaatctggatgtgatcaaaaaa
gaaaactactacgaagtgaatagcaagtgctatgaggaagctaagaagctgaagaagatcagcaacca
ggccgagtttatcgcctccttctacaacaacgatctgatcaagatcaacggcgagctgtatagagtga
tcggcgtgaacaacgacctgctgaaccggatcgaagtgaacatgatcgacatcacctaccgcgagtac
ctggaaaacatgaacgacaagaggccccccaggatcattaagacaatcgcctccaagacccagagcat
taagaagtacagcacagacattctgggcaacctgtatgaagtgaaatctaagaagcaccctcagatca
tcaaaaagggcaaaaggccggcggccacgaaaaaggccggccaggcaaaaaagaaaaag
SEQ ID NO: 29
codon optimized nucleic acid sequence encoding S. aureus Cas9
accggtgcca ccatgtaccc atacgatgtt ccagattacg cttcgccgaa gaaaaagcgc
aaggtcgaag cgtccatgaa aaggaactac attctggggc tggacatcgg gattacaagc
gtggggtatg ggattattga ctatgaaaca agggacgtga tcgacgcagg cgtcagactg
ttcaaggagg ccaacgtgga aaacaatgag ggacggagaa gcaagagggg agccaggcgc
ctgaaacgac ggagaaggca cagaatccag agggtgaaga aactgctgtt cgattacaac
ctgctgaccg accattctga gctgagtgga attaatcctt atgaagccag ggtgaaaggc
ctgagtcaga agctgtcaga ggaagagttt tccgcagctc tgctgcacct ggctaagcgc
cgaggagtgc ataacgtcaa tgaggtggaa gaggacaccg gcaacgagct gtctacaaag
gaacagatct cacgcaatag caaagctctg gaagagaagt atgtcgcaga gctgcagctg
gaacggctga agaaagatgg cgaggtgaga gggtcaatta ataggttcaa gacaagcgac
tacgtcaaag aagccaagca gctgctgaaa gtgcagaagg cttaccacca gctggatcag
agcttcatcg atacttatat cgacctgctg gagactcgga gaacctacta tgagggacca
ggagaaggga gccccttcgg atggaaagac atcaaggaat ggtacgagat gctgatggga
cattgcacct attttccaga agagctgaga agcgtcaagt acgcttataa cgcagatct
tacaacgccc tgaatgacct gaacaacctg gtcatcacca gggatgaaaa cgagaaactg
gaatactatg agaagttcca gatcatcgaa aacgtgttta agcagaagaa aaagcctaca
ctgaaacaga ttgctaagga gatcctggtc aacgaagagg acatcaaggg ctaccgggtg
acaagcactg gaaaaccaga gttcaccaat ctgaaagtgt atcacgatat taaggacatc
acagcacgga aagaaatcat tgagaacgcc gaactgctgg atcagattgc taagatcctg
actatctacc agagctccga ggacatccag gaagagctga ctaacctgaa cagcgagctg
acccaggaag agatcgaaca gattagtaat ctgaaggggt acaccggaac acacaacctg
tccctgaaag ctatcaatct gattctggat gagctgtggc atacaaacga caatcagatt
gcaatcttta accggctgaa gctggtccca aaaaaggtgg acctgagtca gcagaaagag
atcccaacca cactggtgga cgatttcatt ctgtcacccg tggtcaagcg gagcttcatc
cagagcatca aagtgatcaa cgccatcatc aagaagtacg gcctgcccaa tgatatcatt
atcgagctgg ctagggagaa gaacagcaag gacgcacaga agatgatcaa tgagatgcag
aaacgaaacc ggcagaccaa tgaacgcatt gaagagatta tccgaactac cgggaaagag
aacgcaaagt acctgattga aaaaatcaag ctgcacgata tgcaggaggg aaagtgtctg
tattctctgg aggccatccc cctggaggac ctgctgaaca atccattcaa ctacgaggtc
gatcatatta tccccagaag cgtgtccttc gacaattcct ttaacaacaa ggtgctggtc
aagcaggaag agaactctaa aaagggcaat aggactcctt tccagtacct gtctagttca
gattccaaga tctcttacga aacctttaaa aagcacattc tgaatctggc caaaggaaag
ggccgcatca gcaagaccaa aaaggagtac ctgctggaag agcgggacat caacagattc
tccgtccaga aggattttat taaccggaat ctggtggaca caagatacgc tactcgcggc
ctgatgaatc tgctgcgatc ctatttccgg gtgaacaatc tggatgtgaa agtcaagtcc
atcaacggcg ggttcacatc ttttctgagg cgcaaatgga agtttaaaaa ggagcgcaac
aaagggtaca agcaccatgc cgaagatgct ctgattatcg caaatgccga cttcatcttt
aaggagtgga aaaagctgga caaagccaag aaagtgatgg agaaccagat gttcgaagag
aagcaggccg aatctatgcc cgaaatcgag acagaacagg agtacaagga gattttcatc
actcctcacc agatcaagca tatcaaggat ttcaaggact acaagtactc tcaccgggtg
gataaaaagc ccaacagaga gctgatcaat gacaccctgt atagtacaag aaaagacgat
aaggggaata ccctgattgt gaacaatctg aacggactgt acgacaaaga taatgacaag
ctgaaaaagc tgatcaacaa aagtcccgag aagctgctga tgtaccacca tgatcctcag
acatatcaga aactgaagct gattatggag cagtacggcg acgagaagaa cccactgtat
aagtactatg aagagactgg gaactacctg accaagtata gcaaaaagga taatggcccc
gtgatcaaga agatcaagta ctatgggaac aagctgaatg cccatctgga catcacagac
gattacccta acagtcgcaa caaggtggtc aagctgtcac tgaagccata cagattcgat
gtctatctgg acaacggcgt gtataaattt gtgactgtca agaatctgga tgtcatcaaa
aaggagaact actatgaagt gaatagcaag tgctacgaag aggctaaaaa gctgaaaaag
attagcaacc aggcagagtt catcgcctcc ttttacaaca acgacctgat taagatcaat
ggcgaactgt atagggtcat cggggtgaac aatgatctgc tgaaccgcat tgaagtgaat
atgattgaca tcacttaccg agagtatctg gaaaacatga atgataagcg cccccctcga
attatcaaaa caattgcctc taagactcag agtatcaaaa agtactcaac cgacattctg
ggaaacctgt atgaggtgaa gagcaaaaag caccctcaga ttatcaaaaa gggctaagaa
tcc
SEQ ID NO: 30
codon optimized nucleic acid sequence encoding S. aureus Cas9
atggccccaaagaagaagcggaaggtcggtatccacggagtcccagcagccaagcggaactacatcct
gggcctggacatcggcatcaccagcgtgggctacggcatcatcgactacgagacacgggacgtgatcg
atgccggcgtgcggctgttcaaagaggccaacgtggaaaacaacgagggcaggcggagcaagagaggc
gccagaaggctgaagcggcggaggcggcatagaatccagagagtgaagaagctgctgttcgactacaa
cctgctgaccgaccacagcgagctgagcggcatcaacccctacgaggccagagtgaagggcctgagcc
agaagctgagcgaggaagagttctctgccgccctgctgcacctggccaagagaagaggcgtgcacaac
gtgaacgaggtggaagaggacaccggcaacgagctgtccaccaaagagcagatcagccggaacagcaa
ggccctggaagagaaatacgtggccgaactgcagctggaacggctgaagaaagacggcgaagtgcggg
gcagcatcaacagattcaagaccagcgactacgtgaaagaagccaaacagctgctgaaggtgcagaag
gcctaccaccagctggaccagagcttcatcgacacctacatcgacctgctggaaacccggcggaccta
ctatgagggacctggcgagggcagccccttcggctggaaggacatcaaagaatggtacgagatgctga
tgggccactgcacctacttccccgaggaactgcggagcgtgaagtacgcctacaacgccgacctgtac
aacgccctgaacgacctgaacaatctcgtgatcaccagggacgagaacgagaagctggaatattacga
gaagttccagatcatcgagaacgtgttcaagcagaagaagaagcccaccctgaagcagatcgccaaag
aaatcctcgtgaacgaagaggatattaagggctacagagtgaccagcaccggcaagcccgagttcacc
aacctgaaggtgtaccacgacatcaaggacattaccgcccggaaagagattattgagaacgccgagct
gctggatcagattgccaagatcctgaccatctaccagagcagcgaggacatccaggaagaactgacca
atctgaactccgagctgacccaggaagagatcgagcagatctctaatctgaagggctataccggcacc
cacaacctgagcctgaaggccatcaacctgatcctggacgagctgtggcacaccaacgacaaccagat
cgctatcttcaaccggctgaagctggtgcccaagaaggtggacctgtcccagcagaaagagatcccca
ccaccctggtggacgacttcatcctgagccccgtcgtgaagagaagcttcatccagagcatcaaagtg
atcaacgccatcatcaagaagtacggcctgcccaacgacatcattatcgagctggcccgcgagaagaa
ctccaaggacgcccagaaaatgatcaacgagatgcagaagcggaaccggcagaccaacgagcggatcg
aggaaatcatccggaccaccggcaaagagaacgccaagtacctgatcgagaagatcaagctgcacgac
atgcaggaaggcaagtgcctgtacagcctggaagccatccctctggaagatctgctgaacaacccctt
caactatgaggtggaccacatcatccccagaagcgtgtccttcgacaacagcttcaacaacaaggtgc
tcgtgaagcaggaagaaaacagcaagaagggcaaccggaccccattccagtacctgagcagcagcgac
agcaagatcagctacgaaaccttcaagaagcacatcctgaatctggccaagggcaagggcagaatcag
caagaccaagaaagagtatctgctggaagaacgggacatcaacaggttctccgtgcagaaagacttca
tcaaccggaacctggtggataccagatacgccaccagaggcctgatgaacctgctgcggagctacttc
agagtgaacaacctggacgtgaaagtgaagtccatcaatggcggcttcaccagctttctgcggcggaa
gtggaagtttaagaaagagcggaacaaggggtacaagcaccacgccgaggacgccctgatcattgcca
acgccgatttcatcttcaaagagtggaagaaactggacaaggccaaaaaagtgatggaaaaccagatg
ttcgaggaaaagcaggccgagagcatgcccgagatcgaaaccgagcaggagtacaaagagatcttcat
caccccccaccagatcaagcacattaaggacttcaaggactacaagtacagccaccgggtggacaaga
agcctaatagagagctgattaacgacaccctgtactccacccggaaggacgacaagggcaacaccctg
atcgtgaacaatctgaacggcctgtacgacaaggacaatgacaagctgaaaaagctgatcaacaagag
ccccgaaaagctgctgatgtaccaccacgacccccagacctaccagaaactgaagctgattatggaac
agtacggcgacgagaagaatcccctgtacaagtactacgaggaaaccgggaactacctgaccaagtac
tccaaaaaggacaacggccccgtgatcaagaagattaagtattacggcaacaaactgaacgcccatct
ggacatcaccgacgactaccccaacagcagaaacaaggtcgtgaagctgtccctgaagccctacagat
tcgacgtgtacctggacaatggcgtgtacaagttcgtgaccgtgaagaatctggatgtgatcaaaaaa
gaaaactactacgaagtgaatagcaagtgctatgaggaagctaagaagctgaagaagatcagcaacca
ggccgagtttatcgcctccttctacaacaacgatctgatcaagatcaacggcgagctgtatagagtga
tcggcgtgaacaacgacctgctgaaccggatcgaagtgaacatgatcgacatcacctaccgcgagtac
ctggaaaacatgaacgacaagaggccccccaggatcattaagacaatcgcctccaagacccagagcat
taagaagtacagcacagacattctgggcaacctgtatgaagtgaaatctaagaagcaccctcagatca
tcaaaaagggcaaaaggccggcggccacgaaaaaggccggccaggcaaaaaagaaaaag
SEQ ID NO: 31
codon optimized nucleic acid sequences encoding S. aureus Cas9
aagcggaactacatcctgggcctggacatcggcatcaccagcgtgggctacggcatcatcgactacga
gacacgggacgtgatcgatgccggcgtgcggctgttcaaagaggccaacgtggaaaacaacgagggca
ggcggagcaagagaggcgccagaaggctgaagcggcggaggcggcatagaatccagagagtgaagaag
ctgctgttcgactacaacctgctgaccgaccacagcgagctgagcggcatcaacccctacgaggccag
agtgaagggcctgagccagaagctgagcgaggaagagttctctgccgccctgctgcacctggccaaga
gaagaggcgtgcacaacgtgaacgaggtggaagaggacaccggcaacgagctgtccaccaaagagcag
atcagccggaacagcaaggccctggaagagaaatacgtggccgaactgcagctggaacggctgaagaa
agacggcgaagtgcggggcagcatcaacagattcaagaccagcgactacgtgaaagaagccaaacagc
tgctgaaggtgcagaaggcctaccaccagctggaccagagcttcatcgacacctacatcgacctgctg
gaaacccggcggacctactatgagggacctggcgagggcagccccttcggctggaaggacatcaaaga
atggtacgagatgctgatgggccactgcacctacttccccgaggaactgcggagcgtgaagtacgcct
acaacgccgacctgtacaacgccctgaacgacctgaacaatctcgtgatcaccagggacgagaacgag
aagctggaatattacgagaagttccagatcatcgagaacgtgttcaagcagaagaagaagcccaccct
gaagcagatcgccaaagaaatcctcgtgaacgaagaggatattaagggctacagagtgaccagcaccg
gcaagcccgagttcaccaacctgaaggtgtaccacgacatcaaggacattaccgcccggaaagagatt
attgagaacgccgagctgctggatcagattgccaagatcctgaccatctaccagagcagcgaggacat
ccaggaagaactgaccaatctgaactccgagctgacccaggaagagatcgagcagatctctaatctga
agggctataccggcacccacaacctgagcctgaaggccatcaacctgatcctggacgagctgtggcac
accaacgacaaccagatcgctatcttcaaccggctgaagctggtgcccaagaaggtggacctgtccca
gcagaaagagatccccaccaccctggtggacgacttcatcctgagccccgtcgtgaagagaagcttca
tccagagcatcaaagtgatcaacgccatcatcaagaagtacggcctgcccaacgacatcattatcgag
ctggcccgcgagaagaactccaaggacgcccagaaaatgatcaacgagatgcagaagcggaaccggca
gaccaacgagcggatcgaggaaatcatccggaccaccggcaaagagaacgccaagtacctgatcgaga
agatcaagctgcacgacatgcaggaaggcaagtgcctgtacagcctggaagccatccctctggaagat
ctgctgaacaaccccttcaactatgaggtggaccacatcatccccagaagcgtgtccttcgacaacag
cttcaacaacaaggtgctcgtgaagcaggaagaaaacagcaagaagggcaaccggaccccattccagt
acctgagcagcagcgacagcaagatcagctacgaaaccttcaagaagcacatcctgaatctggccaag
ggcaagggcagaatcagcaagaccaagaaagagtatctgctggaagaacgggacatcaacaggttctc
cgtgcagaaagacttcatcaaccggaacctggtggataccagatacgccaccagaggcctgatgaacc
tgctgcggagctacttcagagtgaacaacctggacgtgaaagtgaagtccatcaatggcggcttcacc
agctttctgcggcggaagtggaagtttaagaaagagcggaacaaggggtacaagcaccacgccgagga
cgccctgatcattgccaacgccgatttcatcttcaaagagtggaagaaactggacaaggccaaaaaag
tgatggaaaaccagatgttcgaggaaaagcaggccgagagcatgcccgagatcgaaaccgagcaggag
tacaaagagatcttcatcaccccccaccagatcaagcacattaaggacttcaaggactacaagtacag
ccaccgggtggacaagaagcctaatagagagctgattaacgacaccctgtactccacccggaaggacg
acaagggcaacaccctgatcgtgaacaatctgaacggcctgtacgacaaggacaatgacaagctgaaa
aagctgatcaacaagagccccgaaaagctgctgatgtaccaccacgacccccagacctaccagaaact
gaagctgattatggaacagtacggcgacgagaagaatcccctgtacaagtactacgaggaaaccggga
actacctgaccaagtactccaaaaaggacaacggccccgtgatcaagaagattaagtattacggcaac
aaactgaacgcccatctggacatcaccgacgactaccccaacagcagaaacaaggtcgtgaagctgtc
cctgaagccctacagattcgacgtgtacctggacaatggcgtgtacaagttcgtgaccgtgaagaatc
tggatgtgatcaaaaaagaaaactactacgaagtgaatagcaagtgctatgaggaagctaagaagctg
aagaagatcagcaaccaggccgagtttatcgcctccttctacaacaacgatctgatcaagatcaacgg
cgagctgtatagagtgatcggcgtgaacaacgacctgctgaaccggatcgaagtgaacatgatcgaca
tcacctaccgcgagtacctggaaaacatgaacgacaagaggccccccaggatcattaagacaatcgcc
tccaagacccagagcattaagaagtacagcacagacattctgggcaacctgtatgaagtgaaatctaa
gaagcaccctcagatcatcaaaaagggc
SEQ ID NO: 32
Vector (pDO242) encoding codon optimized nucleic acid sequence encoding
S. aureus Cas9
ctaaattgtaagcgttaatattttgttaaaattcgcgttaaatttttgttaaatcagctcatttttta
accaataggccgaaatcggcaaaatcccttataaatcaaaagaatagaccgagatagggttgagtgtt
gttccagtttggaacaagagtccactattaaagaacgtggactccaacgtcaaagggcgaaaaaccgt
ctatcagggcgatggcccactacgtgaaccatcaccctaatcaagttttttggggtcgaggtgccgta
aagcactaaatcggaaccctaaagggagcccccgatttagagcttgacggggaaagccggcgaacgtg
gcgagaaaggaagggaagaaagcgaaaggagcgggcgctagggcgctggcaagtgtagcggtcacgct
gcgcgtaaccaccacacccgccgcgcttaatgcgccgctacagggcgcgtcccattcgccattcaggc
tgcgcaactgttgggaagggcgatcggtgcgggcctcttcgctattacgccagctggcgaaaggggga
tgtgctgcaaggcgattaagttgggtaacgccagggttttcccagtcacgacgttgtaaaacgacggc
cagtgagcgcgcgtaatacgactcactatagggcgaattgggtacCtttaattctagtactatgcaTg
cgttgacattgattattgactagttattaatagtaatcaattacggggtcattagttcatagcccata
tatggagttccgcgttacataacttacggtaaatggcccgcctggctgaccgcccaacgacccccgcc
cattgacgtcaataatgacgtatgttcccatagtaacgccaatagggactttccattgacgtcaatgg
gtggagtatttacggtaaactgcccacttggcagtacatcaagtgtatcatatgccaagtacgccccc
tattgacgtcaatgacggtaaatggcccgcctggcattatgcccagtacatgaccttatgggactttc
ctacttggcagtacatctacgtattagtcatcgctattaccatggtgatgcggttttggcagtacatc
aatgggcgtggatagcggtttgactcacggggatttccaagtctccaccccattgacgtcaatgggag
tttgttttggcaccaaaatcaacgggactttccaaaatgtcgtaacaactccgccccattgacgcaaa
tgggcggtaggcgtgtacggtgggaggtctatataagcagagctctctggctaactaccggtgccacc
ATGAAAAGGAACTACATTCTGGGGCTGGACATCGGGATTACAAGCGTGGGGTATGGGATTATTGACTA
TGAAACAAGGGACGTGATCGACGCAGGCGTCAGACTGTTCAAGGAGGCCAACGTGGAAAACAATGAGG
GACGGAGAAGCAAGAGGGGAGCCAGGCGCCTGAAACGACGGAGAAGGCACAGAATCCAGAGGGTGAAG
AAACTGCTGTTCGATTACAACCTGCTGACCGACCATTCTGAGCTGAGTGGAATTAATCCTTATGAAGC
CAGGGTGAAAGGCCTGAGTCAGAAGCTGTCAGAGGAAGAGTTTTCCGCAGCTCTGCTGCACCTGGCTA
AGCGCCGAGGAGTGCATAACGTCAATGAGGTGGAAGAGGACACCGGCAACGAGCTGTCTACAAAGGAA
CAGATCTCACGCAATAGCAAAGCTCTGGAAGAGAAGTATGTCGCAGAGCTGCAGCTGGAACGGCTGAA
GAAAGATGGCGAGGTGAGAGGGTCAATTAATAGGTTCAAGACAAGCGACTACGTCAAAGAAGCCAAGC
AGCTGCTGAAAGTGCAGAAGGCTTACCACCAGCTGGATCAGAGCTTCATCGATACTTATATCGACCTG
CTGGAGACTCGGAGAACCTACTATGAGGGACCAGGAGAAGGGAGCCCCTTCGGATGGAAAGACATCAA
GGAATGGTACGAGATGCTGATGGGACATTGCACCTATTTTCCAGAAGAGCTGAGAAGCGTCAAGTACG
CTTATAACGCAGATCTGTACAACGCCCTGAATGACCTGAACAACCTGGTCATCACCAGGGATGAAAAC
GAGAAACTGGAATACTATGAGAAGTTCCAGATCATCGAAAACGTGTTTAAGCAGAAGAAAAAGCCTAC
ACTGAAACAGATTGCTAAGGAGATCCTGGTCAACGAAGAGGACATCAAGGGCTACCGGGTGACAAGCA
CTGGAAAACCAGAGTTCACCAATCTGAAAGTGTATCACGATATTAAGGACATCACAGCACGGAAAGAA
ATCATTGAGAACGCCGAACTGCTGGATCAGATTGCTAAGATCCTGACTATCTACCAGAGCTCCGAGGA
CATCCAGGAAGAGCTGACTAACCTGAACAGCGAGCTGACCCAGGAAGAGATCGAACAGATTAGTAATC
TGAAGGGGTACACCGGAACACACAACCTGTCCCTGAAAGCTATCAATCTGATTCTGGATGAGCTGTGG
CATACAAACGACAATCAGATTGCAATCTTTAACCGGCTGAAGCTGGTCCCAAAAAAGGTGGACCTGAG
TCAGCAGAAAGAGATCCCAACCACACTGGTGGACGATTTCATTCTGTCACCCGTGGTCAAGCGGAGCT
TCATCCAGAGCATCAAAGTGATCAACGCCATCATCAAGAAGTACGGCCTGCCCAATGATATCATTATC
GAGCTGGCTAGGGAGAAGAACAGCAAGGACGCACAGAAGATGATCAATGAGATGCAGAAACGAAACCG
GCAGACCAATGAACGCATTGAAGAGATTATCCGAACTACCGGGAAAGAGAACGCAAAGTACCTGATTG
AAAAAATCAAGCTGCACGATATGCAGGAGGGAAAGTGTCTGTATTCTCTGGAGGCCATCCCCCTGGAG
GACCTGCTGAACAATCCATTCAACTACGAGGTCGATCATATTATCCCCAGAAGCGTGTCCTTCGACAA
TTCCTTTAACAACAAGGTGCTGGTCAAGCAGGAAGAGAACTCTAAAAAGGGCAATAGGACTCCTTTCC
AGTACCTGTCTAGTTCAGATTCCAAGATCTCTTACGAAACCTTTAAAAAGCACATTCTGAATCTGGCC
AAAGGAAAGGGCCGCATCAGCAAGACCAAAAAGGAGTACCTGCTGGAAGAGCGGGACATCAACAGATT
CTCCGTCCAGAAGGATTTTATTAACCGGAATCTGGTGGACACAAGATACGCTACTCGCGGCCTGATGA
ATCTGCTGCGATCCTATTTCCGGGTGAACAATCTGGATGTGAAAGTCAAGTCCATCAACGGCGGGTTC
ACATCTTTTCTGAGGCGCAAATGGAAGTTTAAAAAGGAGCGCAACAAAGGGTACAAGCACCATGCCGA
AGATGOTCTGATTATCGCAAATGCCGACTTCATCTTTAAGGAGTGGAAAAAGCTGGACAAAGCCAAGA
AAGTGATGGAGAACCAGATGTTCGAAGAGAAGCAGGCCGAATCTATGCCCGAAATCGAGACAGAACAG
GAGTACAAGGAGATTTTCATCACTCCTCACCAGATCAAGCATATCAAGGATTTCAAGGACTACAAGTA
CTCTCACCGGGTGGATAAAAAGCCCAACAGAGAGCTGATCAATGACACCCTGTATAGTACAAGAAAAG
ACGATAAGGGGAATACCCTGATTGTGAACAATCTGAACGGACTGTACGACAAAGATAATGACAAGCTG
AAAAAGCTGATCAACAAAAGTCCCGAGAAGCTGCTGATGTACCACCATGATCCTCAGACATATCAGAA
ACTGAAGCTGATTATGGAGCAGTACGGCGACGAGAAGAACCCACTGTATAAGTACTATGAAGAGACTG
GGAACTACCTGACCAAGTATAGCAAAAAGGATAATGGCCCCGTGATCAAGAAGATCAAGTACTATGGG
AACAAGCTGAATGCCCATCTGGACATCACAGACGATTACCCTAACAGTCGCAACAAGGTGGTCAAGCT
GTCACTGAAGCCATACAGATTCGATGTCTATCTGGACAACGGCGTGTATAAATTTGTGACTGTCAAGA
ATCTGGATGTCATCAAAAAGGAGAACTACTATGAAGTGAATAGCAAGTGCTACGAAGAGGCTAAAAAG
CTGAAAAAGATTAGCAACCAGGCAGAGTTCATCGCCTCCTTTTACAACAACGACCTGATTAAGATCAA
TGGCGAACTGTATAGGGTCATCGGGGTGAACAATGATCTGCTGAACCGCATTGAAGTGAATATGATTG
ACATCACTTACCGAGAGTATCTGGAAAACATGAATGATAAGCGCCCCCCTCGAATTATCAAAACAATT
GCCTCTAAGACTCAGAGTATCAAAAAGTACTCAACCGACATTCTGGGAAACCTGTATGAGGTGAAGAG
CAAAAAGCACCCTCAGATTATCAAAAAGGGCagcggaggcaagcgtcctgctgctactaagaaagctg
gtcaagctaagaaaaagaaaggatcctacccatacgatgttccagattacgcttaagaattcctagag
ctcgctgatcagcctcgactgtgccttctagttgccagccatctgttgtttgcccctcccccgtgcct
tccttgaccctggaaggtgccactcccactgtcctttcctaataaaatgaggaaattgcatcgcattg
tctgagtaggtgtcattctattctggggggtggggtggggcaggacagcaagggggaggattgggaag
agaatagcaggcatgctggggaggtagcggccgcCCgcggtggagctccagcttttgttccctttagt
gagggttaattgcgcgcttggcgtaatcatggtcatagctgtttcctgtgtgaaattgttatccgctc
acaattccacacaacatacgagccggaagcataaagtgtaaagcctggggtgcctaatgagtgagcta
actcacattaattgcgttgcgctcactgcccgctttccagtcgggaaacctgtcgtgccagctgcatt
aatgaatcggccaacgcgcggggagaggcggtttgcgtattgggcgctcttccgcttcctcgctcact
gactcgctgcgctcggtcgttcggctgcggcgagcggtatcagctcactcaaaggcggtaatacggtt
atccacagaatcaggggataacgcaggaaagaacatgtgagcaaaaggccagcaaaaggccaggaacc
gtaaaaaggccgcgttgctggcgtttttccataggctccgcccccctgacgagcatcacaaaaatcga
cgctcaagtcagaggtggcgaaacccgacaggactataaagataccaggcgtttccccctggaagctc
cctcgtgcgctctcctgttccgaccctgccgcttaccggatacctgtccgcctttctcccttcgggaa
gcgtggcgctttctcatagctcacgctgtaggtatctcagttcggtgtaggtcgttcgctccaagctg
ggctgtgtgcacgaaccccccgttcagcccgaccgctgcgccttatccggtaactatcgtcttgagtc
caacccggtaagacacgacttatcgccactggcagcagccactggtaacaggattagcagagcgaggt
atgtaggcggtgctacagagttcttgaagtggtggcctaactacggctacactagaaggacagtattt
ggtatctgcgctctgctgaagccagttaccttcggaaaaagagttggtagctcttgatccggcaaaca
aaccaccgctggtagcggtggtttttttgtttgcaagcagcagattacgcgcagaaaaaaaggatctc
aagaagatcctttgatcttttctacggggtctgacgctcagtggaacgaaaactcacgttaagggatt
ttggtcatgagattatcaaaaaggatcttcacctagatccttttaaattaaaaatgaagttttaaatc
aatctaaagtatatatgagtaaacttggtctgacagttaccaatgcttaatcagtgaggcacctatct
cagcgatctgtctatttcgttcatccatagttgcctgactccccgtcgtgtagataactacgatacgg
gagggcttaccatctggccccagtgctgcaatgataccgcgagacccacgctcaccggctccagattt
atcagcaataaaccagccagccggaagggccgagcgcagaagtggtcctgcaactttatccgcctcca
tccagtctattaattgttgccgggaagctagagtaagtagttcgccagttaatagtttgcgcaacgtt
gttgccattgctacaggcatcgtggtgtcacgctcgtcgtttggtatggcttcattcagctccggttc
ccaacgatcaaggcgagttacatgatcccccatgttgtgcaaaaaagcggttagctccttcggtcctc
cgatcgttgtcagaagtaagttggccgcagtgttatcactcatggttatggcagcactgcataattct
cttactgtcatgccatccgtaagatgcttttctgtgactggtgagtactcaaccaagtcattctgaga
atagtgtatgcggcgaccgagttgctcttgcccggcgtcaatacgggataataccgcgccacatagca
gaactttaaaagtgctcatcattggaaaacgttcttcggggcgaaaactctcaaggatcttaccgctg
ttgagatccagttcgatgtaacccactcgtgcacccaactgatcttcagcatcttttactttcaccag
cgtttctgggtgagcaaaaacaggaaggcaaaatgccgcaaaaaagggaataagggcgacacggaaat
gttgaatactcatactcttcctttttcaatattattgaagcatttatcagggttattgtctcatgagc
ggatacatatttgaatgtatttagaaaaataaacaaataggggttccgcgcacatttccccgaaaagt
gccac
SEQ ID NO: 33
Human p300 (with L553M mutation) protein
MAENVVEPGPPSAKRPKLSSPALSASASDGTDFGSLEDLEHDLPDELINSTELGLINGGDINQLQTSL
GMVQDAASKHKQLSELLRSGSSPNLNMGVGGPGQVMASQAQQSSPGLGLINSMVKSPMTQAGLTSPNM
GMGTSGPNQGPTQSTGMMNSPVNQPAMGMNTGMNAGMNPGMLAAGNGQGIMPNQVMNGSIGAGRGRQN
MQYPNPGMGSAGNLLTEPLQQGSPQMGGQTGLRGPQPLKMGMMNNPNPYGSPYTQNPGQQIGASGLGL
QIQTKTVLSNNLSPFAMDKKAVPGGGMPNMGQQPAPQVQQPGLVTPVAQGMGSGAHTADPEKRKLIQQ
QLVLLLHAHKCQRREQANGEVRQCNLPHCRTMKNVLNHMTHCQSGKSCQVAHCASSRQIISHWKNCTR
HDCPVCLPLKNAGDKRNQQPILTGAPVGLGNPSSLGVGQQSAPNLSTVSQIDPSSIERAYAALGLPYQ
VNQMPTQPQVQAKNQQNQQPGQSPQGMRPMSNMSASPMGVNGGVGVQTPSLLSDSMLHSAINSQNPMM
SENASVPSMGPMPTAAQPSTTGIRKQWHEDITQDLRNHLVHKLVQAIFPTPDPAALKDRRMENLVAYA
RKVEGDMYESANNRAEYYHLLAEKIYKIQKELEEKRRTRLQKQNMLPNAAGMVPVSMNPGPNMGQPQP
GMTSNGPLPDPSMIRGSVPNQMMPRITPQSGLNQFGQMSMAQPPIVPRQTPPLQHHGQLAQPGALNPP
MGYGPRMQQPSNQGQFLPQTQFPSQGMNVTNIPLAPSSGQAPVSQAQMSSSSCPVNSPIMPPGSQGSH
IHCPQLPQPALHQNSPSPVPSRTPTPHHTPPSIGAQQPPATTIPAPVPTPPAMPPGPQSQALHPPPRQ
TPTPPTTQLPQQVQPSLPAAPSADQPQQQPRSQQSTAASVPTPTAPLLPPQPATPLSQPAVSIEGQVS
NPPSTSSTEVNSQAIAEKQPSQEVKMEAKMEVDQPEPADTQPEDISESKVEDCKMESTETEERSTELK
TEIKEEEDQPSTSATQSSPAPGQSKKKIFKPEELRQALMPTLEALYRQDPESLPFRQPVDPQLLGIPD
YFDIVKSPMDLSTIKRKLDTGQYQEPWQYVDDIWLMFNNAWLYNRKTSRVYKYCSKLSEVFEQEIDPV
MQSLGYCCGRKLEFSPQTLCCYGKQLCTIPRDATYYSYQNRYHFCEKCFNEIQGESVSLGDDPSQPQT
TINKEQFSKRKNDTLDPELFVECTECGRKMHQICVLHHEIIWPAGEVCDGCLKKSARTRKENKESAKR
LPSTRLGTFLENRVNDFLRRQNHPESGEVTVRVVHASDKTVEVKPGMKAREVDSGEMAESFPYRTKAL
FAFEEIDGVDLCFFGMHVQEYGSDCPPPNQRRVYISYLDSVHFFRPKCLRTAVYHEILIGYLEYVKKL
GYTTGHIWACPPSEGDDYIFHCHPPDQKIPKPKRLQEWYKKMLDKAVSERIVHDYKDIFKQATEDRLT
SAKELPYFEGDFWPNVLEESIKELEQEEEERKREENTSNESTDVTKGDSKNAKKKNNKKTSKNKSSLS
RGNKKKPGMPNVSNDLSQKLYATMEKHKEVFFVIRLIAGPAANSLPPIVDPDPLIPCDLMDGRDAFLT
LARDKHLEFSSLRRAQWSTMCMLVELHTQSQDREVYTCNECKHHVETRWHCTVCEDYDLCITCYNTKN
HDHKMEKLGLGLDDESNNQQAAATQSPGDSRRLSIQRCIQSLVHACQCRNANCSLPSCQKMKRVVQHT
RIGVVGQQQGLPSPTPATPTTPTGQQPTTPQTPQPTSQPQPTPPNSMPPYLPRTQAAGPVSQGKAAGQ
VTPPTPPQTAQPPLPGPPPAAVEMAMQIQRAAETQRQMAHVQIFQRPIQHQMPPMTPMAPMGMNPPPM
TRGPSGHLEPGMGPTGMQQQPPWSQGGLPQPQQLQSGMPRPAMMSVAQHGQPLNMAPQPGLGQVGISP
LKPGTVSQQALQNLLRTLRSPSSPLQQQQVLSILHANPQLLAAFIKQRAAKYANSNPQPIPGQPGMPQ
GQPGLQPPTMPGQQGVHSNPAMQNMNPMQAGVQRAGLPQQQPQQQLQPPMGGMSPQAQQMNMNHNTMP
SQFRDILRRQQMMQQQQQQGAGPGIGPGMANHNQFQQPQGVGYPPQQQQRMQHHMQQMQQGNMGQIGQ
LPQALGAEAGASLQAYQQRLLQQQMGSPVQPNPMSPQQHMLPNQAQSPHLQGQQIPNSLSNQVRSPQP
VPSPRPQSQPPHSSPSPRMQPQPSPHHVSPQTSSPHPGLVAAQANPMEQGHFASPDQNSMLSQLASNP
GMANLHGASATDLGLSTDNSDLNSNLSQSTLDIH
SEQ ID NO: 34
Human p300 Core Effector protein (aa 1048-1664 of SEQ ID NO: 33)
IFKPEELRQALMPTLEALYRQDPESLPFRQPVDPQLLGIPDYFDIVKSPMDLSTIKRKLDTGQYQEPW
QYVDDIWLMENNAWLYNRKTSRVYKYCSKLSEVFEQEIDPVMQSLGYCCGRKLEFSPQTLCCYGKQLC
TIPRDATYYSYQNRYHFCEKCFNEIQGESVSLGDDPSQPQTTINKEQFSKRKNDTLDPELEVECTECG
RKMHQICVLHHEIIWPAGEVCDGCLKKSARTRKENKFSAKRLPSTRLGTFLENRVNDFLRRQNHPESG
EVTVRVVHASDKTVEVKPGMKAREVDSGEMAESFPYRTKALFAFEEIDGVDLCFFGMHVQEYGSDCPP
PNQRRVYISYLDSVHFFRPKCLRTAVYHEILIGYLEYVKKLGYTTGHIWACPPSEGDDYIFHCHPPDQ
KIPKPKRLQEWYKKMLDKAVSERIVHDYKDIFKQATEDRLTSAKELPYFEGDEWPNVLEESIKELEQE
EEERKREENTSNESTDVTKGDSKNAKKKNNKKTSKNKSSLSRGNKKKPGMPNVSNDLSQKLYATMEKH
KEVFFVIRLIAGPAANSLPPIVDPDPLIPCDLMDGRDAFLTLARDKHLEFSSLRRAQWSTMCMLVELH
TQSQD
SEQ ID NO: 35
VP64-dCas9-VP64 protein
RADALDDFDLDMLGSDALDDFDLDMLGSDALDDFDLDMLGSDALDDFDLDMVNPKKKRKVGRGMDKKY
SIGLAIGTNSVGWAVITDEYKVPSKKFKVLGNTDRHSIKKNLIGALLFDSGETAEATRLKRTARRRYT
RRKNRICYLQEIFSNEMAKVDDSFFHRLEESELVEEDKKHERHPIFGNIVDEVAYHEKYPTIYHLRKK
LVDSTDKADLRLIYLALAHMIKFRGHFLIEGDLNPDNSDVDKLFIQLVQTYNQLFEENPINASGVDAK
AILSARLSKSRRLENLIAQLPGEKKNGLFGNLIALSLGLTPNFKSNFDLAEDAKLQLSKDTYDDDLDN
LLAQIGDQYADLFLAAKNLSDAILLSDILRVNTEITKAPLSASMIKRYDEHHQDLTLLKALVRQQLPE
KYKEIFFDQSKNGYAGYIDGGASQEEFYKFIKPILEKMDGTEELLVKLNREDLLRKQRTFDNGSIPHQ
IHLGELHAILRRQEDFYPFLKDNREKIEKILTFRIPYYVGPLARGNSRFAWMTRKSEETITPWNFEEV
VDKGASAQSFIERMTNFDKNLPNEKVLPKHSLLYEYFTVYNELTKVKYVTEGMRKPAFLSGEQKKAIV
DLLEKTNRKVTVKQLKEDYFKKIECFDSVEISGVEDRENASLGTYHDLLKIIKDKDFLDNEENEDILE
DIVLTLTLFEDREMIEERLKTYAHLEDDKVMKQLKRRRYTGWGRLSRKLINGIRDKQSGKTILDELKS
DGFANRNFMQLIHDDSLTFKEDIQKAQVSGQGDSLHEHIANLAGSPAIKKGILQTVKVVDELVKVMGR
HKPENIVIEMARENQTTQKGQKNSRERMKRIEEGIKELGSQILKEHPVENTQLQNEKLYLYYLQNGRD
MYVDQELDINRLSDYDVDAIVPQSFLKDDSIDNKVLTRSDKNRGKSDNVPSEEVVKKMKNYWRQLLNA
KLITQRKFDNLTKAERGGLSELDKAGFIKRQLVETRQITKHVAQILDSRMNTKYDENDKLIREVKVIT
LKSKLVSDFRKDFQFYKVREINNYHHAHDAYLNAVVGTALIKKYPKLESEFVYGDYKVYDVRKMIAKS
EQEIGKATAKYFFYSNIMNFFKTEITLANGEIRKRPLIETNGETGEIVWDKGRDFATVRKVLSMPQVN
IVKKTEVQTGGFSKESILPKRNSDKLIARKKDWDPKKYGGFDSPTVAYSVLVVAKVEKGKSKKLKSVK
ELLGITIMERSSFEKNPIDFLEAKGYKEVKKDLIIKLPKYSLFELENGRKRMLASAGELQKGNELALP
SKYVNFLYLASHYEKLKGSPEDNEQKQLEVEQHKHYLDEIIEQISEFSKRVILADANLDKVLSAYNKH
RDKPIREQAENIIHLFTLTNLGAPAAFKYFDTTIDRKRYTSTKEVLDATLIHQSITGLYETRIDLSQL
GGDSRADPKKKRKVASRADALDDFDLDMLGSDALDDFDLDMLGSDALDDFDLDMLGSDALDDFDLDML
I
SEQ ID NO: 36
VP64-dCas9-VP64 DNA
cgggctgacgcattggacgattttgatctggatatgctgggaagtgacgccctcgatgattttgacct
tgacatgcttggttcggatgcccttgatgactttgacctcgacatgctcggcagtgacgcccttgatg
atttcgacctggacatggttaaccccaagaagaagaggaaggtgggccgcggaatggacaagaagtac
tccattgggctcgccatcggcacaaacagcgtcggctgggccgtcattacggacgagtacaaggtgcc
gagcaaaaaattcaaagttctgggcaataccgatcgccacagcataaagaagaacctcattggcgccc
tcctgttcgactccggggaaaccgccgaagccacgcggctcaaaagaacagcacggcgcagatatacc
cgcagaaagaatcggatctgctacctgcaggagatctttagtaatgagatggctaaggtggatgactc
tttcttccataggctggaggagtcctttttggtggaggaggataaaaagcacgagcgccacccaatct
ttggcaatatcgtggacgaggtggcgtaccatgaaaagtacccaaccatatatcatctgaggaagaag
cttgtagacagtactgataaggctgacttgcggttgatctatctcgcgctggcgcatatgatcaaatt
tcggggacacttcctcatcgagggggacctgaacccagacaacagcgatgtcgacaaactctttatcc
aactggttcagacttacaatcagcttttcgaagagaacccgatcaacgcatccggagttgacgccaaa
gcaatcctgagcgctaggctgtccaaatcccggcggctcgaaaacctcatcgcacagctccctgggga
gaagaagaacggcctgtttggtaatcttatcgccctgtcactcgggctgacccccaactttaaatcta
acttcgacctggccgaagatgccaagcttcaactgagcaaagacacctacgatgatgatctcgacaat
ctgctggcccagatcggcgaccagtacgcagacctttttttggcggcaaagaacctgtcagacgccat
tctgctgagtgatattctgcgagtgaacacggagatcaccaaagctccgctgagcgctagtatgatca
agcgctatgatgagcaccaccaagacttgactttgctgaaggcccttgtcagacagcaactgcctgag
aagtacaaggaaattttcttcgatcagtctaaaaatggctacgccggatacattgacggcggagcaag
ccaggaggaattttacaaatttattaagcccatcttggaaaaaatggacggcaccgaggagctgctgg
taaagcttaacagagaagatctgttgcgcaaacagcgcactttcgacaatggaagcatcccccaccag
attcacctgggcgaactgcacgctatcctcaggcggcaagaggatttctacccctttttgaaagataa
cagggaaaagattgagaaaatcctcacatttcggataccctactatgtaggccccctcgcccggggaa
attccagattcgcgtggatgactcgcaaatcagaagagaccatcactccctggaacttcgaggaagtc
gtggataagggggcctctgcccagtccttcatcgaaaggatgactaactttgataaaaatctgcctaa
cgaaaaggtgcttcctaaacactctctgctgtacgagtacttcacagtttataacgagctcaccaagg
tcaaatacgtcacagaagggatgagaaagccagcattcctgtctggagagcagaagaaagctatcgtg
gacctcctcttcaagacgaaccggaaagttaccgtgaaacagctcaaagaagactatttcaaaaagat
tgaatgtttcgactctgttgaaatcagcggagtggaggatcgcttcaacgcatccctgggaacgtatc
acgatctcctgaaaatcattaaagacaaggacttcctggacaatgaggagaacgaggacattcttgag
gacattgtcctcacccttacgttgtttgaagatagggagatgattgaagaacgcttgaaaacttacgc
tcatctcttcgacgacaaagtcatgaaacagctcaagaggcgccgatatacaggatgggggcggctgt
caagaaaactgatcaatgggatccgagacaagcagagtggaaagacaatcctggattttcttaagtcc
gatggatttgccaaccggaacttcatgcagttgatccatgatgactctctcacctttaaggaggacat
ccagaaagcacaagtttctggccagggggacagtcttcacgagcacatcgctaatcttgcaggtagcc
cagctatcaaaaagggaatactgcagaccgttaaggtcgtggatgaactcgtcaaagtaatgggaagg
cataagcccgagaatatcgttatcgagatggcccgagagaaccaaactacccagaagggacagaagaa
cagtagggaaaggatgaagaggattgaagagggtataaaagaactggggtcccaaatccttaaggaac
acccagttgaaaacacccagcttcagaatgagaagctctacctgtactacctgcagaacggcagggac
atgtacgtggatcaggaactggacatcaatcggctctccgactacgacgtggatgccatcgtgcccca
gtcttttctcaaagatgattctattgataataaagtgttgacaagatccgataaaaatagagggaaga
gtgataacgtcccctcagaagaagttgtcaagaaaatgaaaaattattggcggcagctgctgaacgcc
aaactgatcacacaacggaagttcgataatctgactaaggctgaacgaggtggcctgtctgagttgga
taaagccggcttcatcaaaaggcagcttgttgagacacgccagatcaccaagcacgtggcccaaattc
tcgattcacgcatgaacaccaagtacgatgaaaatgacaaactgattcgagaggtgaaagttattact
ctgaagtctaagctggtctcagatttcagaaaggactttcagttttataaggtgagagagatcaacaa
ttaccaccatgcgcatgatgcctacctgaatgcagtggtaggcactgcacttatcaaaaaatatccca
agcttgaatctgaatttgtttacggagactataaagtgtacgatgttaggaaaatgatcgcaaagtct
gagcaggaaataggcaaggccaccgctaagtacttcttttacagcaatattatgaattttttcaagac
cgagattacactggccaatggagagattcggaagcgaccacttatcgaaacaaacggagaaacaggag
aaatcgtgtgggacaagggtagggatttcgcgacagtccggaaggtcctgtccatgccgcaggtgaac
atcgttaaaaagaccgaagtacagaccggaggcttctccaaggaaagtatcctcccgaaaaggaacag
cgacaagctgatcgcacgcaaaaaagattgggaccccaagaaatacggcggattcgattctcctacag
tcgcttacagtgtactggttgtggccaaagtggagaaagggaagtctaaaaaactcaaaagcgtcaag
gaactgctgggcatcacaatcatggagcgatcaagcttcgaaaaaaaccccatcgactttctcgaggc
gaaaggatataaagaggtcaaaaaagacctcatcattaagcttcccaagtactctctctttgagcttg
aaaacggccggaaacgaatgctcgctagtgcgggcgagctgcagaaaggtaacgagctggcactgccc
tctaaatacgttaatttcttgtatctggccagccactatgaaaagctcaaagggtctcccgaagataa
tgagcagaagcagctgttcgtggaacaacacaaacactaccttgatgagatcatcgagcaaataagcg
aattctccaaaagagtgatcctcgccgacgctaacctcgataaggtgctttctgcttacaataagcac
agggataagcccatcagggagcaggcagaaaacattatccacttgtttactctgaccaacttgggcgc
gcctgcagccttcaagtacttcgacaccaccatagacagaaagcggtacacctctacaaaggaggtcc
tggacgccacactgattcatcagtcaattacggggctctatgaaacaagaatcgacctctctcagctc
ggtggagacagcagggctgaccccaagaagaagaggaaggtggctagccgcgccgacgcgctggacga
tttcgatctcgacatgctgggttctgatgccctcgatgactttgacctggatatgttgggaagcgacg
cattggatgactttgatctggacatgctcggctccgatgctctggacgatttcgatctcgatatgtta
atc
SEQ ID NO: 37
mouse utrophin DNA sequence
SEQ ID NO: 38
mouse utrophin amino acid sequence
MAKYGDLEARPDDGQNEFSDIIKSRSDEHNDVQKKTFTKWINARFSKSGKPPISDMFSDL
KDGRKLLDLLEGLTGTSLPKERGSTRVHALNNVNRVLQVLHQNNVDLVNIGGTDIVDGNP
KLTLGLLWSIILHWQVKDVMKDIMSDLQQTNSEKILLSWVRQTTRPYSQVNVLNETTSWT
DGLAFNAVLHRHKPDLESWDRVVKMSPIERLEHAFSKAHTYLGIEKLLDPEDVAVHLPDK
KSIIMYLTSLFEVLPQQVTIDAIREVETLPRKYKKECEEEEIHIQSAVLAEEGQSPRAET
PSTVTEVDMDLDSYQIALEEVLTWLLSAEDTFQEQDDISDDVEEVKEQFATHETFMMELT
AHQSSVGSVLQAGNQLMTQGTLSEEEEFEIQEQMTLLNARWEALRVESMERQSRLHDALM
ELQKKQLQQLSSWLALTEERIQKMESLPLGDDLPSLQKLLQEHKSLQNDLEAEQVKVNSL
THMVVIVDENSGESATALLEDQLQKLGERWTAVCRWTEERWNRLQEISILWQELLEEQCL
LEAWLTEKEEALNKVQTSNFKDQKELSVSVRRLAILKEDMEMKRQTLDQLSEIGQDVGQL
LSNPKASKKMNSDSEELTQRWDSLVQRLEDSSNQVTQAVAKLGMSQIPQKDLLETVHVRE
QGMVKKPKQELPPPPPPKKRQIHVDVEAKKKFDAISTELLNWILKSKTAIQNTEMKEYKK
SQETSGMKKKLKGLEKEQKENLPRLDELNQTGQTLREQMGKEGLSTEEVNDVLERVSLEW
KMISQQLEDLGRKIQLQEDINAYFKQLDAIEETIKEKEEWLRGTPISESPRQPLPGLKDS
CQRELTDLLGLHPRIETLCASCSALKSQPCVPGFVQQGFDDLRHHYQAVRKALEEYQQQL
ENELKSQPGPAYLDTLNTLKKMLSESEKAAQASLNALNDPIAVEQALQEKKALDETLENQ
KHTLHKLSEETKTLEKNMLPDVGKMYKQEFDDVQGRWNKVKTKVSRDLHLLEEITPRLRD
FEADSEVIEKWVSGIKDELMKEQAAQGDAAALQSQLDQCATFANEIETIESSLKNMREVE
TSLQRCPVTGVKTWVQARLVDYQSQLEKFSKEIAIQKSRLSDSQEKALNLKKDLAEMQEW
MAQAEEDYLERDFEYKSPEELESAVEEMKRAKEEVLQKEVRVKILKDSIKLVAAKVPSGG
QELTSEFNEVLESYQLLCNRIRGKCHTLEEVWSCWVELLHYLDLETTWLNTLEERVRSTE
ALPERAEAVHEALESLESVLRHPADNRTQIRELGQTLIDGGILDDIISEKLEAFNSRYEE
LSHLAESKQISLEKQLQVLRETDHMLQVLKESLGELDKQLTTYLTDRIDAFQLPQEAQKI
QAEISAHELTLEELRKNVRSQPPTSPEGRATRGGSQMDMLQRKLREVSTKFQLFQKPANE
EQRMLDCKRVLEGVKAELHVLDVRDVDPDVIQAHLDKCMKLYKTLSEVKLEVETVIKTGR
HIVQKQQTDNPKSMDEQLTSLKVLYNDLGAQVTEGKQDLERASQLSRKMKKEAAVLSEWL
SATEAELVQKSTSEGVIGDLDTEISWAKSILKDLEKRKVDLNGITESSAALQHLVLGSES
VLEENLCVLNAGWSRVRTWTEDWQNTLLNHQNQLELFDGHVAHISTWLYQAEALLDEIEK
KPASKQEEIVKRLLSELDDASLQVENVREQAIILVNARGSASRELVEPKLAELSRNFEKV
SQHIKSARMLIGQDPSSYQGLDPAGTVQAAESFSDLENLEQDIENMLKVVEKHLDPNNDE
KMDEEQAQIEEVLQRGEHLLHEPMEDSKKEKIRLQLLLLHTRYNKIKTIPIQQRKTIPVS
SGITSSALPADYLVEINKILLTLDDIELSLNMPELNTTVYKDFSFQEDSLKSIKGQLDRL
GEQIAVVHEKQPDVIVEASGPEAIQIRDMLAQLNAKWDRVNRVYSDRRGSFARAVEEWRQ
FHHDLDDLTQWLSEAEDLLVDTCAPDGSLDLEKARAQQLELEEGLSSHQPSLIKVNRKGE
DLVQRLRPSEASFLKEKLAGENQRWSTLVAEVEALQPRLKGESQQVLGYKRRLDEVTCWL
TKVESAVQKRSTPDPEESPQELTDLAQETEVQAENIKWINRAELEMLSDKNLSLREREKL
SESLRNVNTTWTKVCREVPSLLKTRTQDPCSAPQMRMAAHPNVQKVVLVSSASDAPLRGG
LEISVPADLDKTITELADWLVLIDQMLKSNIVTVGDVKEINKTVSRMKITKADLEQRHPQ
LDCVFTLAQNLKNKASSSDVRTAITEKLEKLKTQWESTQHGVELRRQQLEDMVVDSLQWD
DHREETEELMRKYEARFYMLQQARRDPLSKQVSDNQLLLQELGSGDGVIMAFDNVLQKLL
EEYSGDDTRNVEETTEYLKTSWVNLKQSIADRQSALEAELQTVQTSRRDLENFVKWLQEA
ETTANVLADASQRENALQDSVLARQLRQQMLDIQAEIDAHNDIFKSIDGNRQKMVKALGN
SEEATMLQHRLDDMNQRWNDLKAKSASIRAHLEASAEKWNRLLASLEELIKWINMKDEEL
KKQMPIGGDVPALQLQYDHCKVLRRELKEKEYSVLNAVDQARVFLADQPIEAPEEPRRNP
QSKTELTPEERAQKIAKAMRKQSSEVREKWENLNAVTSNWQKQVGKALEKLRDLQGAMDD
LDADMKEVEAVRNGWKPVGDLLIDSLQDHIEKTLAFREEIAPINLKVKTMNDLSSQLSPL
DLHPSLKMSRQLDDLNMRWKLLQVSVDDRLKQLWEAHRDFGPSSQHFLSTSVQLPWQRSI
SHNKVPYYINHQTQTTCWDHPKMTELFQSLADLNNVRFSAYRTAIKIRRLQKALCLDLLE
LNTTNEVFKQHKLNQNDQLLSVPDVINCLTTTYDGLEQLHKDLVNVPLCVDMCLNWLLVN
YDTGRTGKIRVQSLKIGLMSLSKGLLEEKYRCLEKEVAGPTEMCDQRQLGLLLHDAIQIP
RQLGEVAAFGGSNIEPSVRSCFQQNNNKPEISVKEFIDWMHLEPQSMVWLPVLHRVAAAE
TAKHQAKCNICKECPIVGFRYRSLKHENYDVCQSCFFSGRTAKGHKLHYPMVEYCIPTTS
GEDVRDETKVLKNKFRSKKYFAKHPRLGYLPVQTVLEGDNLETPITLISMWPEHYDPSQS
PQLFHDDTHSRIEQYATRLAQMERTNGSFLTDSSSTIGSVEDEHALIQQYCQTLGGESPV
SQPQSPAQILKSVEREERGELERIIADLEEEQRNLQVEYEQLKEQHLRRGLPVGSPPDSI
VSPHHTSEDSELIAEAKLLRQHKGRLEARMQILEDHNKQLESQLHRLRQLLEQPDSDSRI
NGVSPWASPQHSALSYSLDTDPGPQFHQAASEDLLAPPHDTSTDLTDVMEQINSTEPSCS
SNVPSRPQAM
SEQ ID NO: 39
SV40 NLS
Pro-Lys-Lys-Lys-Arg-Lys-Val
SEQ ID NO: 40
GS linker (Gly-Gly-Gly-Gly-Ser)ₙ, wherein n is an integer between 0 and 10
SEQ ID NO: 41
Gly-Gly-Gly-Gly-Gly
SEQ ID NO: 42
Gly-Gly-Ala-Gly-Gly
SEQ ID NO: 43
Gly-Gly-Gly-Gly-Ser-Ser-Ser
SEQ ID NO: 44
Gly-Gly-Gly-Gly-Ala-Ala-Ala
SEQ ID NO: 45
Streptococcus pyogenes dCas9-KRAB polynucleotide sequence
atggactacaaagaccatgacggtgattataaagatcatgacatcgattacaaggatgacgatgacaa
gatggcccccaagaagaagaggaaggtgggccgcggaatggacaagaagtactccattgggctcgcca
tcggcacaaacagcgtcggctgggccgtcattacggacgagtacaaggtgccgagcaaaaaattcaaa
gttctgggcaataccgatcgccacagcataaagaagaacctcattggcgccctcctgttcgactccgg
ggaaaccgccgaagccacgcggctcaaaagaacagcacggcgcagatatacccgcagaaagaatcgga
tctgctacctgcaggagatctttagtaatgagatggctaaggtggatgactctttcttccataggctg
gaggagtcctttttggtggaggaggataaaaagcacgagcgccacccaatctttggcaatatcgtgga
cgaggtggcgtaccatgaaaagtacccaaccatatatcatctgaggaagaagcttgtagacagtactg
ataaggctgacttgcggttgatctatctcgcgctggcgcatatgatcaaatttcggggacacttcctc
atcgagggggacctgaacccagacaacagcgatgtcgacaaactctttatccaactggttcagactta
caatcagcttttcgaagagaacccgatcaacgcatccggagttgacgccaaagcaatcctgagcgcta
ggctgtccaaatcccggcggctcgaaaacctcatcgcacagctccctggggagaagaagaacggcctg
tttggtaatcttatcgccctgtcactcgggctgacccccaactttaaatctaacttcgacctggccga
agatgccaagcttcaactgagcaaagacacctacgatgatgatctcgacaatctgctggcccagatcg
gcgaccagtacgcagacctttttttggcggcaaagaacctgtcagacgccattctgctgagtgatatt
ctgcgagtgaacacggagatcaccaaagctccgctgagcgctagtatgatcaagcgctatgatgagca
ccaccaagacttgactttgctgaaggcccttgtcagacagcaactgcctgagaagtacaaggaaattt
tcttcgatcagtctaaaaatggctacgccggatacattgacggcggagcaagccaggaggaattttac
aaatttattaagcccatcttggaaaaaatggacggcaccgaggagctgctggtaaagcttaacagaga
agatctgttgcgcaaacagcgcactttcgacaatggaagcatcccccaccagattcacctgggcgaac
tgcacgctatcctcaggcggcaagaggatttctacccctttttgaaagataacagggaaaagattgag
aaaatcctcacatttcggataccctactatgtaggccccctcgcccggggaaattccagattcgcgtg
gatgactcgcaaatcagaagagaccatcactccctggaacttcgaggaagtcgtggataagggggcct
ctgcccagtccttcatcgaaaggatgactaactttgataaaaatctgcctaacgaaaaggtgcttcct
aaacactctctgctgtacgagtacttcacagtttataacgagctcaccaaggtcaaatacgtcacaga
agggatgagaaagccagcattcctgtctggagagcagaagaaagctatcgtggacctcctcttcaaga
cgaaccggaaagttaccgtgaaacagctcaaagaagactatttcaaaaagattgaatgtttcgactct
gttgaaatcagcggagtggaggatcgcttcaacgcatccctgggaacgtatcacgatctcctgaaaat
cattaaagacaaggacttcctggacaatgaggagaacgaggacattcttgaggacattgtcctcaccc
ttacgttgtttgaagatagggagatgattgaagaacgcttgaaaacttacgctcatctcttcgacgac
aaagtcatgaaacagctcaagaggcgccgatatacaggatgggggcggctgtcaagaaaactgatcaa
tgggatccgagacaagcagagtggaaagacaatcctggattttcttaagtccgatggatttgccaacc
ggaacttcatgcagttgatccatgatgactctctcacctttaaggaggacatccagaaagcacaagtt
tctggccagggggacagtcttcacgagcacatcgctaatcttgcaggtagcccagctatcaaaaaggg
aatactgcagacccttaaggtcgtggatgaactcgtcaaagtaatgggaaggcataagcccgagaata
tcgttatcgagatggcccgagagaaccaaactacccagaagggacagaagaacagtagggaaaggatg
aagaggattgaagagggtataaaagaactggggtcccaaatccttaaggaacacccagttgaaaacac
ccagcttcagaatgagaagctctacctgtactacctgcagaacggcagggacatgtacgtggatcagg
aactggacatcaatcggctctccgactacgacgtggatgccatcgtgccccagtcttttctcaaagat
gattctattgataataaagtgttgacaagatccgataaaaatagagggaagagtgataacgtcccctc
agaagaagttgtcaagaaaatgaaaaattattggcggcagctgctgaacgccaaactgatcacacaac
ggaagttcgataatctgactaaggctgaacgaggtggcctgtctgagttggataaagccggcttcatc
aaaaggcagcttgttgagacacgccagatcaccaagcacgtggcccaaattctcgattcacgcatgaa
caccaagtacgatgaaaatgacaaactgattcgagaggtgaaagttattactctgaagtctaagctgg
tctcagatttcagaaaggactttcagttttataaggtgagagagatcaacaattaccaccatgcgcat
gatgcctacctgaatgcagtggtaggcactgcacttatcaaaaaatatcccaagcttgaatctgaatt
tgtttacggagactataaagtgtacgatgttaggaaaatgatcgcaaagtctgagcaggaaataggca
aggccaccgctaagtacttcttttacagcaatattatgaattttttcaagaccgagattacactggcc
aatggagagattcggaagcgaccacttatcgaaacaaacggagaaacaggagaaatcgtgtgggacaa
gggtagggatttcgcgacagtccggaaggtcctgtccatgccgcaggtgaacatcgttaaaaagaccg
aagtacagaccggaggcttctccaaggaaagtatcctcccgaaaaggaacagcgacaagctgatcgca
cgcaaaaaagattgggaccccaagaaatacggcggattcgattctcctacagtcgcttacagtgtact
ggttgtggccaaagtggagaaagggaagtctaaaaaactcaaaagcgtcaaggaactgctgggcatca
caatcatggagcgatcaagcttcgaaaaaaaccccatcgactttctcgaggcgaaaggatataaagag
gtcaaaaaagacctcatcattaagcttcccaagtactctctctttqagcttgaaaacggccggaaacg
aatgctcgctagtgcgggcgagctgcagaaaggtaacgagctggcactgccctctaaatacgttaatt
tcttgtatctggccagccactatgaaaagctcaaagggtctcccgaagataatgagcagaagcagctg
ttcgtggaacaacacaaacactaccttgatgagatcatcgagcaaataagcgaattctccaaaagagt
gatcctcgccgacgctaacctcgataaggtgctttctgcttacaataagcacagggataagcccatca
gggagcaggcagaaaacattatccacttgtttactctgaccaacttgggcgcgcctgcagccttcaag
tacttcgacaccaccatagacagaaagcggtacacctctacaaaggaggtcctggacgccacactgat
tcatcagtcaattacggggctctatgaaacaagaatcgacctctctcagctcggtggagacagcaggg
ctgaccccaagaagaagaggaaggtggctagcgatgctaagtcactgactgcctggtcccggacactg
gtgaccttcaaggatgtgtttgtggacttcaccagggaggagtggaagctgctggacactgctcagca
gatcctgtacagaaatgtgatgctggagaactataagaacctggtttccttgggttatcagcttacta
agccagatgtgatcctccggttggagaagggagaagagccctggctggtggagagagaaattcaccaa
gagacccatcctgattcagagactgcatttgaaatcaaatcatcagttccgaaaaagaaacgcaaagt
ttga
SEQ ID NO: 46
Streptococcus pyogenes dCas9-KRAB protein sequence
MDYKDHDGDYKDHDIDYKDDDDKMAPKKKRKVGRGMDKKYSIGLAIGTNSVGWAVITDEYKVPSKKFK
VLGNTDRHSIKKNLIGALLFDSGETAEATRLKRTARRRYTRRKNRICYLQEIFSNEMAKVDDSFFHRL
EESELVEEDKKHERHPIFGNIVDEVAYHEKYPTIYHLRKKLVDSTDKADLRLIYLALAHMIKERGHFL
IEGDLNPDNSDVDKLFIQLVQTYNQLFEENPINASGVDAKAILSARLSKSRRLENLIAQLPGEKKNGL
FGNLIALSLGLTPNFKSNFDLAEDAKLQLSKDTYDDDLDNLLAQIGDQYADLFLAAKNLSDAILLSDI
LRVNTEITKAPLSASMIKRYDEHHQDLTLLKALVRQQLPEKYKEIFFDQSKNGYAGYIDGGASQEEFY
KFIKPILEKMDGTEELLVKLNREDLLRKQRTFDNGSIPHQIHLGELHAILRRQEDFYPELKDNREKIE
KILTFRIPYYVGPLARGNSREAWMTRKSEETITPWNFEEVVDKGASAQSFIERMTNFDKNLPNEKVLP
KHSLLYEYFTVYNELTKVKYVTEGMRKPAFLSGEQKKAIVDLLFKTNRKVTVKQLKEDYFKKIECFDS
VEISGVEDRENASLGTYHDLLKIIKDKDFLDNEENEDILEDIVLTLTLFEDREMIEERLKTYAHLFDD
KVMKQLKRRRYTGWGRLSRKLINGIRDKQSGKTILDELKSDGFANRNEMQLIHDDSLTFKEDIQKAQV
SGQGDSLHEHIANLAGSPAIKKGILQTVKVVDELVKVMGRHKPENIVIEMARENQTTQKGQKNSRERM
KRIEEGIKELGSQILKEHPVENTQLQNEKLYLYYLQNGRDMYVDQELDINRLSDYDVDAIVPQSFLKD
DSIDNKVLTRSDKNRGKSDNVPSEEVVKKMKNYWRQLLNAKLITQRKFDNLTKAERGGLSELDKAGFI
KRQLVETRQITKHVAQILDSRMNTKYDENDKLIREVKVITLKSKLVSDFRKDFQFYKVREINNYHHAH
DAYLNAVVGTALIKKYPKLESEFVYGDYKVYDVRKMIAKSEQEIGKATAKYFFYSNIMNFFKTEITLA
NGEIRKRPLIETNGETGEIVWDKGRDFATVRKVLSMPQVNIVKKTEVQTGGFSKESILPKRNSDKLIA
RKKDWDPKKYGGFDSPTVAYSVLVVAKVEKGKSKKLKSVKELLGITIMERSSFEKNPIDFLEAKGYKE
VKKDLIIKLPKYSLFELENGRKRMLASAGELQKGNELALPSKYVNFLYLASHYEKLKGSPEDNEQKQL
FVEQHKHYLDEIIEQISEFSKRVILADANLDKVLSAYNKHRDKPIREQAENIIHLETLTNLGAPAAFK
YFDTTIDRKRYTSTKEVLDATLIHQSITGLYETRIDLSQLGGDSRADPKKKRKVASDAKSLTAWSRTL
VTFKDVEVDFTREEWKLLDTAQQILYRNVMLENYKNLVSLGYQLTKPDVILRLEKGEEPWLVEREIHQ
ETHPDSETAFEIKSSVPKKKRKV
SEQ ID NO: 47
Staphylococcus aureus dCas9-KRAB polynucleotide sequence
atggccccaaagaagaagcggaaggtcggtatccacggagtcccagcagccaagcggaactacatcct
gggcctggccatcggcatcaccagcgtgggctacggcatcatcgactacgagacacgggacgtgatcg
atgccggcgtgcggctgttcaaagaggccaacgtggaaaacaacgagggcaggcggagcaagagaggc
gccagaaggctgaagcggcggaggcggcatagaatccagagagtgaagaagctgctgttcgactacaa
cctgctgaccgaccacagcgagctgagcggcatcaacccctacgaggccagagtgaagggcctgagcc
agaagctgagcgaggaagagttctctgccgccctgctgcacctggccaagagaagaggcgtgcacaac
gtgaacgaggtggaagaggacaccggcaacgagctgtccaccaaagagcagatcagccggaacagcaa
ggccctggaagagaaatacgtggccgaactgcagctggaacggctgaagaaagacggcgaagtgcggg
gcagcatcaacagattcaagaccagcgactacgtgaaagaagccaaacagctgctgaaggtgcagaag
gcctaccaccagctggaccagagcttcatcgacacctacatcgacctgctggaaacccggcggaccta
ctatgagggacctggcgagggcagccccttcggctggaaggacatcaaagaatggtacgagatgctga
tgggccactgcacctacttccccgaggaactgcggagcgtgaagtacgcctacaacgccgacctgtac
aacgccctgaacgacctgaacaatctcgtgatcaccagggacgagaacgagaagctggaatattacga
gaagttccagatcatcgagaacgtgttcaagcagaagaagaagcccaccctgaagcagatcgccaaag
aaatcctcgtgaacgaagaggatattaagggctacagagtgaccagcaccggcaagcccgagttcacc
aacctgaaggtgtaccacgacatcaaggacattaccgcccggaaagagattattgagaacgccgagct
gctggatcagattgccaagatcctgaccatctaccagagcagcgaggacatccaggaagaactgacca
atctgaactccgagctgacccaggaagagatcgagcagatctctaatctgaagggctataccggcacc
cacaacctgagcctgaaggccatcaacctgatcctggacgagctgtggcacaccaacgacaaccagat
cgctatcttcaaccggctgaagctggtgcccaagaaggtggacctgtcccagcagaaagagatcccca
ccaccctggtggacgacttcatcctgagccccgtcgtgaagagaagcttcatccagagcatcaaagtg
atcaacgccatcatcaagaagtacggcctgcccaacgacatcattatcgagctggcccgcgagaagaa
ctccaaggacgcccagaaaatgatcaacgagatgcagaagcggaaccggcagaccaacgagcggatcg
aggaaatcatccggaccaccggcaaagagaacgccaagtacctgatcgagaagatcaagctgcacgac
atgcaggaaggcaagtgcctgtacagcctggaagccatccctctggaagatctgctgaacaacccctt
caactatgaggtggaccacatcatccccagaagcgtgtccttcgacaacagcttcaacaacaaggtgc
tcgtgaagcaggaagaagccagcaagaagggcaaccggaccccattccagtacctgagcagcagcgac
agcaagatcagctacgaaaccttcaagaagcacatcctgaatctggccaagggcaagggcagaatcag
caagaccaagaaagagtatctgctggaagaacgggacatcaacaggttctccgtgcagaaagacttca
tcaaccggaacctggtggataccagatacgccaccagaggcctgatgaacctgctgcggagctacttc
agagtgaacaacctggacgtgaaagtgaagtccatcaatggcggcttcaccagctttctgcggcggaa
gtggaagtttaagaaagagcggaacaaggggtacaagcaccacgccgaggacgccctgatcattgcca
acgccgatttcatcttcaaagagtggaagaaactggacaaggccaaaaaagtgatggaaaaccagatg
ttcgaggaaaagcaggccgagagcatgcccgagatcgaaaccgagcaggagtacaaagagatcttcat
caccccccaccagatcaagcacattaaggacttcaaggactacaagtacagccaccgggtggacaaga
agcctaatagagagctgattaacgacaccctgtactccacccggaaggacgacaagggcaacaccctg
atcgtgaacaatctgaacggcctgtacgacaaggacaatgacaagctgaaaaagctgatcaacaagag
ccccgaaaagctgctgatgtaccaccacgacccccagacctaccagaaactgaagctgattatggaac
agtacggcgacgagaagaatcccctgtacaagtactacgaggaaaccgggaactacctgaccaagtac
tccaaaaaggacaacggccccgtgatcaagaagattaagtattacggcaacaaactgaacgcccatct
ggacatcaccgacgactaccccaacagcagaaacaaggtcgtgaagctgtccctgaagccctacagat
tcgacgtgtacctggacaatggcgtgtacaagttcgtgaccgtgaagaatctggatgtgatcaaaaaa
gaaaactactacgaagtgaatagcaagtgctatgaggaagctaagaagctgaagaagatcagcaacca
ggccgagtttatcgcctccttctacaacaacgatctgatcaagatcaacggcgagctgtatagagtga
tcggcgtgaacaacgacctgctgaaccggatcgaagtgaacatgatcgacatcacctaccgcgagtac
ctggaaaacatgaacgacaagaggccccccaggatcattaagacaatcgcctccaagacccagagcat
taagaagtacagcacagacattctgggcaacctgtatgaagtgaaatctaagaagcaccctcagatca
tcaaaaagggcaaaaggccggcggccacgaaaaaggccggccaggcaaaaaagaaaaagggatccgat
gctaagtcactgactgcctggtcccggacactggtgaccttcaaggatgtgtttgtggacttcaccag
ggaggagtggaagctgctggacactgctcagcagatcctgtacagaaatgtgatgctggagaactata
agaacctggtttccttgggttatcagcttactaagccagatgtgatcctccggttggagaagggagaa
gagccctggctggtggagagagaaattcaccaagagacccatcctgattcagagactgcatttgaaat
caaatcatcagttccgaaaaagaaacgcaaagtt
SEQ ID NO: 48
Staphylococcus aureus dCas9-KRAB protein sequence
MAPKKKRKVGIHGVPAAKRNYILGLAIGITSVGYGIIDYETRDVIDAGVRLFKEANVENNEGRRSKRG
ARRLKRRRRHRIQRVKKLLFDYNLLTDHSELSGINPYEARVKGLSQKLSEEEFSAALLHLAKRRGVHN
VNEVEEDTGNELSTKEQISRNSKALEEKYVAELQLERLKKDGEVRGSINRFKTSDYVKEAKQLLKVQK
AYHQLDQSFIDTYIDLLETRRTYYEGPGEGSPFGWKDIKEWYEMLMGHCTYFPEELRSVKYAYNADLY
NALNDLNNLVITRDENEKLEYYEKFQIIENVEKQKKKPTLKQIAKEILVNEEDIKGYRVTSTGKPEFT
NLKVYHDIKDITARKEIIENAELLDQIAKILTIYQSSEDIQEELTNLNSELTQEEIEQISNLKGYTGT
HNLSLKAINLILDELWHTNDNQIAIFNRLKLVPKKVDLSQQKEIPTTLVDDFILSPVVKRSFIQSIKV
INAIIKKYGLPNDIIIELAREKNSKDAQKMINEMQKRNRQTNERIEEIIRTTGKENAKYLIEKIKLHD
MQEGKCLYSLEAIPLEDLLNNPFNYEVDHIIPRSVSFDNSENNKVLVKQEEASKKGNRTPFQYLSSSD
SKISYETFKKHILNLAKGKGRISKTKKEYLLEERDINRFSVQKDEINRNLVDTRYATRGLMNLLRSYE
RVNNLDVKVKSINGGFTSFLRRKWKFKKERNKGYKHHAEDALIIANADFIFKEWKKLDKAKKVMENQM
FEEKQAESMPEIETEQEYKEIFITPHQIKHIKDEKDYKYSHRVDKKPNRELINDTLYSTRKDDKGNTL
IVNNLNGLYDKDNDKLKKLINKSPEKLLMYHHDPQTYQKLKLIMEQYGDEKNPLYKYYEETGNYLTKY
SKKDNGPVIKKIKYYGNKLNAHLDITDDYPNSRNKVVKLSLKPYRFDVYLDNGVYKEVTVKNLDVIKK
ENYYEVNSKCYEEAKKLKKISNQAEFIASFYNNDLIKINGELYRVIGVNNDLLNRIEVNMIDITYREY
LENMNDKRPPRIIKTIASKTQSIKKYSTDILGNLYEVKSKKHPQIIKKGKRPAATKKAGQAKKKKGSD
AKSLTAWSRTLVTFKDVFVDFTREEWKLLDTAQQILYRNVMLENYKNLVSLGYQLTKPDVILRLEKGE
EPWLVEREIHQETHPDSETAFEIKSSVPKKKRKV
SEQ ID NO: 49
Tet1CD polynucleotide sequence
ctgcccacctgcagctgtcttgatcgagttatacaaaaagacaaaggcccatattatacacaccttgg
ggcaggaccaagtgttgctgctgtcagggaaatcatggagaataggtatggtcaaaaaggaaacgcaa
taaggatagaaatagtagtgtacaccggtaaagaagggaaaagctctcatgggtgtccaattgctaag
tgggttttaagaagaagcagtgatgaagaaaaagttctttgtttggtccggcagcgtacaggccacca
ctgtccaactgctgtgatggtggtgctcatcatggtgtgggatggcatccctcttccaatggccgacc
ggctatacacagagctcacagagaatctaaagtcatacaatgggcaccctaccgacagaagatgcacc
ctcaatgaaaatcgtacctgtacatgtcaaggaattgatccagagacttgtggagcttcattctcttt
tggctgttcatggagtatgtactttaatggctgtaagtttggtagaagcccaagccccagaagattta
gaattgatccaagctctcccttacatgaaaaaaaccttgaagataacttacagagtttggctacacga
ttagctccaatttataagcagtatgctccagtagcttaccaaaatcaggtggaatatgaaaatgttgc
ccgagaatgtcggcttggcagcaaggaaggtcgacccttctctggggtcactgcttgcctggacttct
gtgctcatccccacagggacattcacaacatgaataatggaagcactgtggtttgtaccttaactcga
gaagataaccgctctttgggtgttattcctcaagatgagcagctccatgtgctacctctttataagct
ttcagacacagatgagtttggctccaaggaaggaatggaagccaagatcaaatctggggccatcgagg
tcctggcaccccgccgcaaaaaaagaacgtgtttcactcagcctgttccccgttctggaaagaagagg
gctgcgatgatgacagaggttcttgcacataagataagggcagtggaaaagaaacctattccccgaat
caagcggaagaataactcaacaacaacaaacaacagtaagccttcgtcactgccaaccttagggagta
acactgagaccgtgcaacctgaagtaaaaagtgaaaccgaaccccattttatcttaaaaagttcagac
aacactaaaacttattcgctgatgccatccgctcctcacccagtgaaagaggcatctccaggcttctc
ctggtccccgaagactgcttcagccacaccagctccactgaagaatgacgcaacagcctcatgcgggt
tttcagaaagaagcagcactccccactgtacgatgccttcgggaagactcagtggtgccaatgctgca
gctgctgatggccctggcatttcacagcttggcgaagtggctcctctccccaccctgtctgctcctgt
gatggagcccctcattaattctgagccttccactggtgtgactgagccgctaacgcctcatcagccaa
accaccagccctccttcctcacctctcctcaagaccttgcctcttctccaatggaagaagatgagcag
cattctgaagcagatgagcctccatcagacgaacccctatctgatgaccccctgtcacctgctgagga
gaaattgccccacattgatgagtattggtcagacagtgagcacatctttttggatgcaaatattggtg
gggtggccatcgcacctgctcacggctcggttttgattgagtgtgcccggcgagagctgcacgctacc
actcctgttgagcaccccaaccgtaatcatccaacccgcctctcccttgtcttttaccagcacaaaaa
cctaaataagccccaacatggttttgaactaaacaagattaagtttgaggctaaagaagctaagaata
agaaaatgaaggcctcagagcaaaaagaccaggcagctaatgaaggtccagaacagtcctctgaagta
aatgaattgaaccaaattccttctcataaagcattaacattaacccatgacaatgttgtcaccgtgtc
cccttatgctctcacacacgttgcggggccctataaccattgggtc
SEQ ID NO: 50
Tet1CD amino acid sequence
LPTCSCLDRVIQKDKGPYYTHLGAGPSVAAVREIMENRYGQKGNAIRIEIVVYTGKEGKSSHGCPIAK
WVLRRSSDEEKVLCLVRQRTGHHCPTAVMVVLIMVWDGIPLPMADRLYTELTENLKSYNGHPTDRRCT
LNENRICICQGIDPETCGASFSFGCSWSMYFNGCKFGRSPSPRRFRIDPSSPLHEKNLEDNLQSLATR
LAPIYKQYAPVAYQNQVEYENVARECRLGSKEGRPFSGVTACLDFCAHPHRDIHNMNNGSTVVCTLTR
EDNRSLGVIPQDEQLHVLPLYKLSDTDEFGSKEGMEAKIKSGAIEVLAPRRKKRTCFTQPVPRSGKKR
AAMMTEVLAHKIRAVEKKPIPRIKRKNNSTTTNNSKPSSLPTLGSNTETVQPEVKSETEPHFILKSSD
NTKTYSLMPSAPHPVKEASPGFSWSPKTASATPAPLKNDATASCGFSERSSTPHCTMPSGRLSGANAA
AADGPGISQLGEVAPLPTLSAPVMEPLINSEPSTGVTEPLTPHQPNHQPSFLTSPQDLASSPMEEDEQ
HSEADEPPSDEPLSDDPLSPAEEKLPHIDEYWSDSEHIFLDANIGGVAIAPAHGSVLIECARRELHAT
TPVEHPNRNHPTRLSLVFYQHKNLNKPQHGFELNKIKFEAKEAKNKKMKASEQKDQAANEGPEQSSEV
NELNQIPSHKALTLTHDNVVTVSPYALTHVAGPYNHWV
SEQ ID NO: 51
DNA sequence of the gRNA constant region
gtttaagagctatgctggaaacagcatagcaagtttaaataaggctagtccgttatcaactt
gaaaaagtggcaccgagtcggtgc
SEQ ID NO: 52
RNA sequence of the gRNA constant region
guuuaagagcuaugcuggaaacagcauagcaaguuuaaauaaggcuaguccquuaucaacuu
gaaaaaguggcaccgagucggugc
SEQ ID NO: 53
JCR 179 DNA
AACACACAGCIGGGTTATCAGAG
SEQ ID NO: 54
JCR183 DNA
GAACTGGTGGGAAATGGTCTAG
SEQ ID NO: 103
JCR 179 RNA
AACACACAGCUGGGUUAUCAGAG
SEQ ID NO: 104
JCR183 RNA
GAACUGGUGGGAAAUGGUCUAG

The application's sequence listing, which the Patent Office published only in electronic form, follows.

SEQUENCE LISTING (104 sequences)

SEQ ID NO: 1 - DNA, 3 bp, Artificial Sequence
  Synthetic
  misc_feature (1)..(1): n is a, c, g, or t
nrg

SEQ ID NO: 2 - DNA, 3 bp, Artificial Sequence
  Synthetic
  misc_feature (1)..(1): n is a, c, g, or t
ngg

SEQ ID NO: 3 - DNA, 3 bp, Artificial Sequence
  Synthetic
  misc_feature (1)..(1): n is a, c, g, or t
nag

SEQ ID NO: 4 - DNA, 5 bp, Artificial Sequence
  Synthetic
  misc_feature (1)..(1): n is a, c, g, or t
  misc_feature (4)..(4): n is a, c, g, or t
nggng

SEQ ID NO: 5 - DNA, 7 bp, Artificial Sequence
  Synthetic
  misc_feature (1)..(2): n is a, c, g, or t
nnagaaw

SEQ ID NO: 6 - DNA, 4 bp, Artificial Sequence
  Synthetic
  misc_feature (1)..(1): n is a, c, g, or t
naar

SEQ ID NO: 7 - DNA, 5 bp, Artificial Sequence
  Synthetic
  misc_feature (1)..(2): n is a, c, g, or t
nngrr

SEQ ID NO: 8 - DNA, 6 bp, Artificial Sequence
  Synthetic
  misc_feature (1)..(2): n is a, c, g, or t
  misc_feature (6)..(6): n is a, c, g, or t
nngrrn

SEQ ID NO: 9 - DNA, 6 bp, Artificial Sequence
  Synthetic
  misc_feature (1)..(2): n is a, c, g, or t
nngrrt

SEQ ID NO: 10 - DNA, 6 bp, Artificial Sequence
  Synthetic
  misc_feature (1)..(2): n is a, c, g, or t
nngrrv

SEQ ID NO: 11 - DNA, 8 bp, Artificial Sequence
  Synthetic
  misc_feature (1)..(4): n is a, c, g, or t
nnnngatt

SEQ ID NO: 12 - DNA, 8 bp, Artificial Sequence
  Synthetic
  misc_feature (1)..(4): n is a, c, g, or t
  misc_feature (6)..(8): n is a, c, g, or t
nnnngnnn

SEQ ID NO: 13 - DNA, 3 bp, Artificial Sequence
  Synthetic
  misc_feature (1)..(1): n is a, c, g, or t
nga

SEQ ID NO: 14 - DNA, 6 bp, Artificial Sequence
  Synthetic
  misc_feature (1)..(3): n is a, c, g, or t
nnnrrt

SEQ ID NO: 15 - DNA, 6 bp, Artificial Sequence
  Synthetic
attcct

SEQ ID NO: 16 - DNA, 4 bp, Artificial Sequence
  Synthetic
  misc_feature (1)..(1): n is a, c, g, or t
  misc_feature (4)..(4): n is a, c, g, or t
ngan

SEQ ID NO: 17 - DNA, 4 bp, Artificial Sequence
  Synthetic
  misc_feature (1)..(1): n is a, c, g, or t
  misc_feature (3)..(3): n is a, c, g, or t
ngng

SEQ ID NO: 18 - protein, 1368 aa, Streptococcus pyogenes [sequence omitted]

SEQ ID NO: 19 - protein, 1053 aa, Staphylococcus aureus
MKRNYILGLDIGITSVGYGIIDYETRDVIDAGVRLFKEANVENNEGRRSKRGARRLKRRRRHRIQRVKKLLFDYNLLTDHSELSGINPYEARVKGLSQKLSEEEFSAALLHLAKRRGVHNVNEVEEDTGNELSTKEQISRNSKALEEKYVAELQLERLKKDGEVRGSINRFKTSDYVKEAKQLLKVQKAYHQLDQSFIDTYIDLLETRRTYYEGPGEGSPFGWKDIKEWYEMLMGHCTYFPEELRSVKYAYNADLYNALNDLNNLVITRDENEKLEYYEKFQIIENVFKQKKKPTLKQIAKEILVNEEDIKGYRVTSTGKPEFTNLKVYHDIKDITARKEIIENAELLDQIAKILTIYQSSEDIQEELTNLNSELTQEEIEQISNLKGYTGTHNLSLKAINLILDELWHTNDNQIAIFNRLKLVPKKVDLSQQKEIPTTLVDDFILSPVVKRSFIQSIKVINAIIKKYGLPNDIIIELAREKNSKDAQKMINEMQKRNRQTNERIEEIIRTTGKENAKYLIEKIKLHDMQEGKCLYSLEAIPLEDLLNNPFNYEVDHIIPRSVSFDNSFNNKVLVKQEENSKKGNRTPFQYLSSSDSKISYETFKKHILNLAKGKGRISKTKKEYLLEERDINRFSVQKDFINRNLVDTRYATRGLMNLLRSYFRVNNLDVKVKSINGGFTSFLRRKWKFKKERNKGYKHHAEDALIIANADFIFKEWKKLDKAKKVMENQMFEEKQAESMPEIETEQEYKEIFITPHQIKHIKDFKDYKYSHRVDKKPNRELINDTLYSTRKDDKGNTLIVNNLNGLYDKDNDKLKKLINKSPEKLLMYHHDPQTYQKLKLIMEQYGDEKNPLYKYYEETGNYLTKYSKKDNGPVIKKIKYYGNKLNAHLDITDDYPNSRNKVVKLSLKPYRFDVYLDNGVYKFVTVKNLDVIKKENYYEVNSKCYEEAKKLKKISNQAEFIASFYNNDLIKINGELYRVIGVNNDLLNRIEVNMIDITYREYLENMNDKRPPRIIKTIASKTQSIKKYSTDILGNLYEVKSKKHPQIIKKG

SEQ ID NO: 20 - protein, 1368 aa, Streptococcus pyogenes
MDKKYSIGLAIGTNSVGWAVITDEYKVPSKKFKVLGNTDRHSIKKNLIGALLFDSGETAEATRLKRTARRRYTRRKNRICYLQEIFSNEMAKVDDSFFHRLEESFLVEEDKKHERHPIFGNIVDEVAYHEKYPTIYHLRKKLVDSTDKADLRLIYLALAHMIKFRGHFLIEGDLNPDNSDVDKLFIQLVQTYNQLFEENPINASGVDAKAILSARLSKSRRLENLIAQLPGEKKNGLFGNLIALSLGLTPNFKSNFDLAEDAKLQLSKDTYDDDLDNLLAQIGDQYADLFLAAKNLSDAILLSDILRVNTEITKAPLSASMIKRYDEHHQDLTLLKALVRQQLPEKYKEIFFDQSKNGYAGYIDGGASQEEFYKFIKPILEKMDGTEELLVKLNREDLLRKQRTFDNGSIPHQIHLGELHAILRRQEDFYPFLKDNREKIEKILTFRIPYYVGPLARGNSRFAWMTRKSEETITPWNFEEVVDKGASAQSFIERMTNFDKNLPNEKVLPKHSLLYEYFTVYNELTKVKYVTEGMRKPAFLSGEQKKAIVDLLFKTNRKVTVKQLKEDYFKKIECFDSVEISGVEDRFNASLGTYHDLLKIIKDKDFLDNEENEDILEDIVLTLTLFEDREMIEERLKTYAHLFDDKVMKQLKRRRYTGWGRLSRKLINGIRDKQSGKTILDFLKSDGFANRNFMQLIHDDSLTFKEDIQKAQVSGQGDSLHEHIANLAGSPAIKKGILQTVKVVDELVKVMGRHKPENIVIEMARENQTTQKGQKNSRERMKRIEEGIKELGSQILKEHPVENTQLQNEKLYLYYLQNGRDMYVDQELDINRLSDYDVDHIVPQSFLKDDSIDNKVLTRSDKNRGKSDNVPSEEVVKKMKNYWRQLLNAKLITQRKFDNLTKAERGGLSELDKAGFIKRQLVETRQITKHVAQILDSRMNTKYDENDKLIREVKVITLKSKLVSDFRKDFQFYKVREINNYHHAHDAYLNAVVGTALIKKYPKLESEFVYGDYKVYDVRKMIAKSEQEIGKATAKYFFYSNIMNFFKTEITLANGEIRKRPLIETNGETGEIVWDKGRDFATVRKVLSMPQVNIVKKTEVQTGGFSKESILPKRNSDKLIARKKDWDPKKYGGFDSPTVAYSVLVVAKVEKGKSKKLKSVKELLGITIMERSSFEKNPIDFLEAKGYKEVKKDLIIKLPKYSLFELENGRKRMLASAGELQKGNELALPSKYVNFLYLASHYEKLKGSPEDNEQKQLFVEQHKHYLDEIIEQISEFSKRVILADANLDKVLSAYNKHRDKPIREQAENIIHLFTLTNLGAPAAFKYFDTTIDRKRYTSTKEVLDATLIHQSITGLYETRIDLSQLGGD

SEQ ID NO: 21 - protein, 1368 aa, Streptococcus pyogenes
MDKKYSIGLAIGTNSVGWAVITDEYKVPSKKFKVLGNTDRHSIKKNLIGALLFDSGETAEATRLKRTARRRYTRRKNRICYLQEIFSNEMAKVDDSFFHRLEESFLVEEDKKHERHPIFGNIVDEVAYHEKYPTIYHLRKKLVDSTDKADLRLIYLALAHMIKFRGHFLIEGDLNPDNSDVDKLFIQLVQTYNQLFEENPINASGVDAKAILSARLSKSRRLENLIAQLPGEKKNGLFGNLIALSLGLTPNFKSNFDLAEDAKLQLSKDTYDDDLDNLLAQIGDQYADLFLAAKNLSDAILLSDILRVNTEITKAPLSASMIKRYDEHHQDLTLLKALVRQQLPEKYKEIFFDQSKNGYAGYIDGGASQEEFYKFIKPILEKMDGTEELLVKLNREDLLRKQRTFDNGSIPHQIHLGELHAILRRQEDFYPFLKDNREKIEKILTFRIPYYVGPLARGNSRFAWMTRKSEETITPWNFEEVVDKGASAQSFIERMTNFDKNLPNEKVLPKHSLLYEYFTVYNELTKVKYVTEGMRKPAFLSGEQKKAIVDLLFKTNRKVTVKQLKEDYFKKIECFDSVEISGVEDRFNASLGTYHDLLKIIKDKDFLDNEENEDILEDIVLTLTLFEDREMIEERLKTYAHLFDDKVMKQLKRRRYTGWGRLSRKLINGIRDKQSGKTILDFLKSDGFANRNFMQLIHDDSLTFKEDIQKAQVSGQGDSLHEHIANLAGSPAIKKGILQTVKVVDELVKVMGRHKPENIVIEMARENQTTQKGQKNSRERMKRIEEGIKELGSQILKEHPVENTQLQNEKLYLYYLQNGRDMYVDQELDINRLSDYDVDAIVPQSFLKDDSIDNKVLTRSDKNRGKSDNVPSEEVVKKMKNYWRQLLNAKLITQRKFDNLTKAERGGLSELDKAGFIKRQLVETRQITKHVAQILDSRMNTKYDENDKLIREVKVITLKSKLVSDFRKDFQFYKVREINNYHHAHDAYLNAVVGTALIKKYPKLESEFVYGDYKVYDVRKMIAKSEQEIGKATAKYFFYSNIMNFFKTEITLANGEIRKRPLIETNGETGEIVWDKGRDFATVRKVLSMPQVNIVKKTEVQTGGFSKESILPKRNSDKLIARKKDWDPKKYGGFDSPTVAYSVLVVAKVEKGKSKKLKSVKELLGITIMERSSFEKNPIDFLEAKGYKEVKKDLIIKLPKYSLFELENGRKRMLASAGELQKGNELALPSKYVNFLYLASHYEKLKGSPEDNEQKQLFVEQHKHYLDEIIEQISEFSKRVILADANLDKVLSAYNKHRDKPIREQAENIIHLFTLTNLGAPAAFKYFDTTIDRKRYTSTKEVLDATLIHQSITGLYETRIDLSQLGGD

SEQ ID NO: 22 - DNA, 3159 bp, Artificial Sequence
  Synthetic
atgaaaaggaactacattctggggctggccatcgggattacaagcgtggggtatgggattattgactatgaaacaagggacgtgatcgacgcaggcgtcagactgttcaaggaggccaacgtggaaaacaatgagggacggagaagcaagaggggagccaggcgcctgaaacgacggagaaggcacagaatccagagggtgaagaaactgctgttcgattacaacctgctgaccgaccattctgagctgagtggaattaatccttatgaagccagggtgaaaggcctgagtcagaagctgtcagaggaagagttttccgcagctctgctgcacctggctaagcgccgaggagtgcataacgtcaatgaggtggaagaggacaccggcaacgagctgtctacaaaggaacagatctcacgcaatagcaaagctctggaagagaagtatgtcgcagagctgcagctggaacggctgaagaaagatggcgaggtgagagggtcaattaataggttcaagacaagcgactacgtcaaagaagccaagcagctgctgaaagtgcagaaggcttaccaccagctggatcagagcttcatcgatacttatatcgacctgctggagactcggagaacctactatgagggaccaggagaagggagccccttcggatggaaagacatcaaggaatggtacgagatgctgatgggacattgcacctattttccagaagagctgagaagcgtcaagtacgcttataacgcagatctgtacaacgccctgaatgacctgaacaacctggtcatcaccagggatgaaaacgagaaactggaatactatgagaagttccagatcatcgaaaacgtgtttaagcagaagaaaaagcctacactgaaacagattgctaaggagatcctggtcaacgaagaggacatcaagggctaccgggtgacaagcactggaaaaccagagttcaccaatctgaaagtgtatcacgatattaaggacatcacagcacggaaagaaatcattgagaacgccgaactgctggatcagattgctaagatcctgactatctaccagagctccgaggacatccaggaagagctgactaacctgaacagcgagctgacccaggaagagatcgaacagattagtaatctgaaggggtacaccggaacacacaacctgtccctgaaagctatcaatctgattctggatgagctgtggcatacaaacgacaatcagattgcaatctttaaccggctgaagctggtcccaaaaaaggtggacctgagtcagcagaaagagatcccaaccacactggtggacgatttcattctgtcacccgtggtcaagcggagcttcatccagagcatcaaagtgatcaacgccatcatcaagaagtacggcctgcccaatgatatcattatcgagctggctagggagaagaacagcaaggacgcacagaagatgatcaatgagatgcagaaacgaaaccggcagaccaatgaacgcattgaagagattatccgaactaccgggaaagagaacgcaaagtacctgattgaaaaaatcaagctgcacgatatgcaggagggaaagtgtctgtattctctggaggccatccccctggaggacctgctgaacaatccattcaactacgaggtcgatcatattatccccagaagcgtgtccttcgacaattcctttaacaacaaggtgctggtcaagcaggaagagaactctaaaaagggcaataggactcctttccagtacctgtctagttcagattccaagatctcttacgaaacctttaaaaagcacattctgaatctggccaaaggaaagggccgcatcagcaagaccaaaaaggagtacctgctggaagagcgggacatcaacagattctccgtccagaaggattttattaaccggaatctggtggacacaagatacgctactcgcggcctgatgaatctgctgcgatcctatttccgggtgaacaatctggatgtgaaagtcaagtccatcaacggcgggttcacatcttttctgaggcgcaaatggaagtttaaaaaggagcgcaacaaagggtacaagcaccatgccgaagatgctctgattatcgcaaatgccgacttcatctttaaggagtggaaaaagctggacaaagccaagaaagtgatggagaaccagatgttcgaagagaagcaggccgaatctatgcccgaaatcgagacagaacaggagtacaaggagattttcatcactcctcaccagatcaagcatatcaaggatttcaaggactacaagtactctcaccgggtggataaaaagcccaacagagagctgatcaatgacaccctgtatagtacaagaaaagacgataaggggaataccctgattgtgaacaatctgaacggactgtacgacaaagataatgacaagctgaaaaagctgatcaacaaaagtcccgagaagctgctgatgtaccaccatgatcctcagacatatcagaaactgaagctgattatggagcagtacggcgacgagaagaacccactgtataagtactatgaagagactgggaactacctgaccaagtatagcaaaaaggataatggccccgtgatcaagaagatcaagtactatgggaacaagctgaatgcccatctggacatcacagacgattaccctaacagtcgcaacaaggtggtcaagctgtcactgaagccatacagattcgatgtctatctggacaacggcgtgtataaatttgtgactgtcaagaatctggatgtcatcaaaaaggagaactactatgaagtgaatagcaagtgctacgaagaggctaaaaagctgaaaaagattagcaaccaggcagagttcatcgcctccttttacaacaacgacctgattaagatcaatggcgaactgtatagggtcatcggggtgaacaatgatctgctgaaccgcattgaagtgaatatgattgacatcacttaccgagagtatctggaaaacatgaatgataagcgcccccctcgaattatcaaaacaattgcctctaagactcagagtatcaaaaagtactcaaccgacattctgggaaacctgtatgaggtgaagagcaaaaagcaccctcagattatcaaaaagggc

SEQ ID NO: 23 - DNA, 3159 bp, Artificial Sequence
  Synthetic
atgaaaaggaactacattctggggctggacatcgggattacaagcgtggggtatgggattattgactatgaaacaagggacgtgatcgacgcaggcgtcagactgttcaaggaggccaacgtggaaaacaatgagggacggagaagcaagaggggagccaggcgcctgaaacgacggagaaggcacagaatccagagggtgaagaaactgctgttcgattacaacctgctgaccgaccattctgagctgagtggaattaatccttatgaagccagggtgaaaggcctgagtcagaagctgtcagaggaagagttttccgcagctctgctgcacctggctaagcgccgaggagtgcataacgtcaatgaggtggaagaggacaccggcaacgagctgtctacaaaggaacagatctcacgcaatagcaaagctctggaagagaagtatgtcgcagagctgcagctggaacggctgaagaaagatggcgaggtgagagggtcaattaataggttcaagacaagcgactacgtcaaagaagccaagcagctgctgaaagtgcagaaggcttaccaccagctggatcagagcttcatcgatacttatatcgacctgctggagactcggagaacctactatgagggaccaggagaagggagccccttcggatggaaagacatcaaggaatggtacgagatgctgatgggacattgcacctattttccagaagagctgagaagcgtcaagtacgcttataacgcagatctgtacaacgccctgaatgacctgaacaacctggtcatcaccagggatgaaaacgagaaactggaatactatgagaagttccagatcatcgaaaacgtgtttaagcagaagaaaaagcctacactgaaacagattgctaaggagatcctggtcaacgaagaggacatcaagggctaccgggtgacaagcactggaaaaccagagttcaccaatctgaaagtgtatcacgatattaaggacatcacagcacggaaagaaatcattgagaacgccgaactgctggatcagattgctaagatcctgactatctaccagagctccgaggacatccaggaagagctgactaacctgaacagcgagctgacccaggaagagatcgaacagattagtaatctgaaggggtacaccggaacacacaacctgtccctgaaagctatcaatctgattctggatgagctgtggcatacaaacgacaatcagattgcaatctttaaccggctgaagctggtcccaaaaaaggtggacctgagtcagcagaaagagatcccaaccacactggtggacgatttcattctgtcacccgtggtcaagcggagcttcatccagagcatcaaagtgatcaacgccatcatcaagaagtacggcctgcccaatgatatcattatcgagctggctagggagaagaacagcaaggacgcacagaagatgatcaatgagatgcagaaacgaaaccggcagaccaatgaacgcattgaagagattatccgaactaccgggaaagagaacgcaaagtacctgattgaaaaaatcaagctgcacgatatgcaggagggaaagtgtctgtattctctggaggccatccccctggaggacctgctgaacaatccattcaactacgaggtcgatcatattatccccagaagcgtgtccttcgacaattcctttaacaacaaggtgctggtcaagcaggaagaggcctctaaaaagggcaataggactcctttccagtacctgtctagttcagattccaagatctcttacgaaacctttaaaaagcacattctgaatctggccaaaggaaagggccgcatcagcaagaccaaaaaggagtacctgctggaagagcgggacatcaacagattctccgtccagaaggattttattaaccggaatctggtggacacaagatacgctactcgcggcctgatgaatctgctgcgatcctatttccgggtgaacaatctggatgtgaaagtcaagtccatcaacggcgggttcacatcttttctgaggcgcaaatggaagtttaaaaaggagcgcaacaaagggtacaagcaccatgccgaagatgctctgattatcgcaaatgccgacttcatctttaaggagtggaaaaagctggacaaagccaagaaagtgatggagaaccagatgttcgaagagaagcaggccgaatctatgcccgaaatcgagacagaacaggagtacaaggagattttcatcactcctcaccagatcaagcatatcaaggatttcaaggactacaagtactctcaccgggtggataaaaagcccaacagagagctgatcaatgacaccctgtatagtacaagaaaagacgataaggggaataccctgattgtgaacaatctgaacggactgtacgacaaagataatgacaagctgaaaaagctgatcaacaaaagtcccgagaagctgctgatgtaccaccatgatcctcagacatatcagaaactgaagctgattatggagcagtacggcgacgagaagaacccactgtataagtactatgaagagactgggaactacctgaccaagtatagcaaaaaggataatggccccgtgatcaagaagatcaagtactatgggaacaagctgaatgcccatctggacatcacagacgattaccctaacagtcgcaacaaggtggtcaagctgtcactgaagccatacagattcgatgtctatctggacaacggcgtgtataaatttgtgactgtcaagaatctggatgtcatcaaaaaggagaactactatgaagtgaatagcaagtgctacgaagaggctaaaaagctgaaaaagattagcaaccaggcagagttcatcgcctccttttacaacaacgacctgattaagatcaatggcgaactgtatagggtcatcggggtgaacaatgatctgctgaaccgcattgaagtgaatatgattgacatcacttaccgagagtatctggaaaacatgaatgataagcgcccccctcgaattatcaaaacaattgcctctaagactcagagtatcaaaaagtactcaaccgacattctgggaaacctgtatgaggtgaagagcaaaaagcaccctcagattatcaaaaagggc

SEQ ID NO: 24 - DNA, 4107 bp, Artificial Sequence
  Synthetic
atggataaaaagtacagcatcgggctggacatcggtacaaactcagtggggtgggccgtgattacggacgagtacaaggtaccctccaaaaaatttaaagtgctgggtaacacggacagacactctataaagaaaaatcttattggagccttgctgttcgactcaggcgagacagccgaagccacaaggttgaagcggaccgccaggaggcggtataccaggagaaagaaccgcatatgctacctgcaagaaatcttcagtaacgagatggcaaaggttgacgatagctttttccatcgcctggaagaatcctttcttgttgaggaagacaagaagcacgaacggcaccccatctttggcaatattgtcgacgaagtggcatatcacgaaaagtacccgactatctaccacctcaggaagaagctggtggactctaccgataaggcggacctcagacttatttatttggcactcgcccacatgattaaatttagaggacatttcttgatcgagggcgacctgaacccggacaacagtgacgtcgataagctgttcatccaacttgtgcagacctacaatcaactgttcgaagaaaaccctataaatgcttcaggagtcgacgctaaagcaatcctgtccgcgcgcctctcaaaatctagaagacttgagaatctgattgctcagttgcccggggaaaagaaaaatggattgtttggcaacctgatcgccctcagtctcggactgaccccaaatttcaaaagtaacttcgacctggccgaagacgctaagctccagctgtccaaggacacatacgatgacgacctcgacaatctgctggcccagattggggatcagtacgccgatctctttttggcagcaaagaacctgtccgacgccatcctgttgagcgatatcttgagagtgaacaccgaaattactaaagcaccccttagcgcatctatgatcaagcggtacgacgagcatcatcaggatctgaccctgctgaaggctcttgtgaggcaacagctccccgaaaaatacaaggaaatcttctttgaccagagcaaaaacggctacgctggctatatagatggtggggccagtcaggaggaattctataaattcatcaagcccattctcgagaaaatggacggcacagaggagttgctggtcaaacttaacagggaggacctgctgcggaagcagcggacctttgacaacgggtctatcccccaccagattcatctgggcgaactgcacgcaatcctgaggaggcaggaggatttttatccttttcttaaagataaccgcgagaaaatagaaaagattcttacattcaggatcccgtactacgtgggacctctcgcccggggcaattcacggtttgcctggatgacaaggaagtcagaggagactattacaccttggaacttcgaagaagtggtggacaagggtgcatctgcccagtctttcatcgagcggatgacaaattttgacaagaacctccctaatgagaaggtgctgcccaaacattctctgctctacgagtactttaccgtctacaatgaactgactaaagtcaagtacgtcaccgagggaatgaggaagccggcattccttagtggagaacagaagaaggcgattgtagacctgttgttcaagaccaacaggaaggtgactgtgaagcaacttaaagaagactactttaagaagatcgaatgttttgacagtgtggaaatttcaggggttgaagaccgcttcaatgcgtcattggggacttaccatgatcttctcaagatcataaaggacaaagacttcctggacaacgaagaaaatgaggatattctcgaagacatcgtcctcaccctgaccctgttcgaagacagggaaatgatagaagagcgcttgaaaacctatgcccacctcttcgacgataaagttatgaagcagctgaagcgcaggagatacacaggatggggaagattgtcaaggaagctgatcaatggaattagggataaacagagtggcaagaccatactggatttcctcaaatctgatggcttcgccaataggaacttcatgcaactgattcacgatgactctcttaccttcaaggaggacattcaaaaggctcaggtgagcgggcagggagactcccttcatgaacacatcgcgaatttggcaggttcccccgctattaaaaagggcatccttcaaactgtcaaggtggtggatgaattggtcaaggtaatgggcagacataagccagaaaatattgtgatcgagatggcccgcgaaaaccagaccacacagaagggccagaaaaatagtagagagcggatgaagaggatcgaggagggcatcaaagagctgggatctcagattctcaaagaacaccccgtagaaaacacacagctgcagaacgaaaaattgtacttgtactatctgcagaacggcagagacatgtacgtcgaccaagaacttgatattaatagactgtccgactatgacgtagaccatatcgtgccccagtccttcctgaaggacgactccattgataacaaagtcttgacaagaagcgacaagaacaggggtaaaagtgataatgtgcctagcgaggaggtggtgaaaaaaatgaagaactactggcgacagctgcttaatgcaaagctcattacacaacggaagttcgataatctgacgaaagcagagagaggtggcttgtctgagttggacaaggcagggtttattaagcggcagctggtggaaactaggcagatcacaaagcacgtggcgcagattttggacagccggatgaacacaaaatacgacgaaaatgataaactgatacgagaggtcaaagttatcacgctgaaaagcaagctggtgtccgattttcggaaagacttccagttctacaaagttcgcgagattaataactaccatcatgctcacgatgcgtacctgaacgctgttgtcgggaccgccttgataaagaagtacccaaagctggaatccgagttcgtatacggggattacaaagtgtacgatgtgaggaaaatgatagccaagtccgagcaggagattggaaaggccacagctaagtacttcttttattctaacatcatgaatttttttaagacggaaattaccctggccaacggagagatcagaaagcggccccttatagagacaaatggtgaaacaggtgaaatcgtctgggataagggcagggatttcgctactgtgaggaaggtgctgagtatgccacaggtaaatatcgtgaaaaaaaccgaagtacagaccggaggattttccaaggaaagcattttgcctaaaagaaactcagacaagctcatcgcccgcaagaaagattgggaccctaagaaatacgggggatttgactcacccaccgtagcctattctgtgctggtggtagctaaggtggaaaaaggaaagtctaagaagctgaagtccgtgaaggaactcttgggaatcactatcatggaaagatcatcctttgaaaagaaccctatcgatttcctggaggctaagggttacaaggaggtcaagaaagacctcatcattaaactgccaaaatactctctcttcgagctggaaaatggcaggaagagaatgttggccagcgccggagagctgcaaaagggaaacgagcttgctctgccctccaaatatgttaattttctctatctcgcttcccactatgaaaagctgaaagggtctcccgaagataacgagcagaagcagctgttcgtcgaacagcacaagcactatctggatgaaataatcgaacaaataagcgagttcagcaaaagggttatcctggcggatgctaatttggacaaagtactgtctgcttataacaagcaccgggataagcctattagggaacaagccgagaatataattcacctctttacactcacgaatctcggagcccccgccgccttcaaatactttgatacgactatcgaccggaaacggtataccagtaccaaagaggtcctcgatgccaccctcatccaccagtcaattactggcctgtacgaaacacggatcgacctctctcaactgggcggcgactag

SEQ ID NO: 25 - DNA, 3158 bp, Artificial Sequence
  Synthetic
atgaaaaggaactacattctggggctggacatcgggattacaagcgtggggtatgggattattgactatgaaacaagggacgtgatcgacgcaggcgtcagactgttcaaggaggccaacgtggaaaacaatgagggacggagaagcaagaggggagccaggcgcctgaaacgacggagaaggcacagaatccagagggtgaagaaactgctgttcgattacaacctgctgaccgaccattctgagctgagtggaattaatccttatgaagccagggtgaaaggcctgagtcagaagctgtcagaggaagagttttccgcagctctgctgcacctggctaagcgccgaggagtgcataacgtcaatgaggtggaagaggacaccggcaacgagctgtctacaaaggaacagatctcacgcaatagcaaagctctggaagagaagtatgtcgcagagctgcagctggaacggctgaagaaagatggcgaggtgagagggtcaattaataggttcaagacaagcgactacgtcaaagaagccaagcagctgctgaaagtgcagaaggcttaccaccagctggatcagagcttcatcgatacttatatcgacctgctggagactcggagaacctactatgagggaccaggagaagggagccccttcggatggaaagacatcaaggaatggtacgagatgctgatgggacattgcacctattttccagaagagctgagaagcgtcaagtacgcttataacgcagatctgtacaacgccctgaatgacctgaacaacctggtcatcaccagggatgaaaacgagaaactggaatactatgagaagttccagatcatcgaaaacgtgtttaagcagaagaaaaagcctacactgaaacagattgctaaggagatcctggtcaacgaagaggacatcaagggctaccgggtgacaagcactggaaaaccagagttcaccaatctgaaagtgtatcacgatattaaggacatcacagcacggaaagaaatcattgagaacgccgaactgctggatcagattgctaagatcctgactatctaccagagctccgaggacatccaggaagagctgactaacctgaacagcgagctgacccaggaagagatcgaacagattagtaatctgaaggggtacaccggaacacacaacctgtccctgaaagctatcaatctgattctggatgagctgtggcatacaaacgacaatcagattgcaatctttaaccggctgaagctggtcccaaaaaaggtggacctgagtcagcagaaagagatcccaaccacactggtggacgatttcattctgtcacccgtggtcaagcggagcttcatccagagcatcaaagtgatcaacgccatcatcaagaagtacggcctgcccaatgatatcattatcgagctggctagggagaagaacagcaaggacgcacagaagatgatcaatgagatgcagaaacgaaaccggcagaccaatgaacgcattgaagagattatccgaactaccgggaaagagaacgcaaagtacctgattgaaaaaatcaagctgcacgatatgcaggagggaaagtgtctgtattctctggaggcctccccctggaggacctgctgaacaatccattcaactacgaggtcgatcatattatccccagaagcgtgtccttcgacaattcctttaacaacaaggtgctggtcaagcaggaagagaactctaaaaagggcaataggactcctttccagtacctgtctagttcagattccaagatctcttacgaaacctttaaaaagcacattctgaatctggccaaaggaaagggccgcatcagcaagaccaaaaaggagtacctgctggaagagcgggacatcaacagattctccgtccagaaggattttattaaccggaatctggtggacacaagatacgctactcgcggcctgatgaatctgctgcgatcctatttccgggtgaacaatctggatgtgaaagtcaagtccatcaacggcgggttcacatcttttctgaggcgcaaatggaagtttaaaaaggagcgcaacaaagggtacaagcaccatgccgaagatgctctgattatcgcaaatgccgacttcatctttaaggagtggaaaaagctggacaaagccaagaaagtgatggagaaccagatgttcgaagagaagcaggccgaatctatgcccgaaatcgagacagaacaggagtacaaggagattttcatcactcctcaccagatcaagcatatcaaggatttcaaggactacaagtactctcaccgggtggataaaaagcccaacagagagctgatcaatgacaccctgtatagtacaagaaaagacgataaggggaataccctgattgtgaacaatctgaacggactgtacgacaaagataatgacaagctgaaaaagctgatcaacaaaagtcccgagaagctgctgatgtaccaccatgatcctcagacatatcagaaactgaagctgattatggagcagtacggcgacgagaagaacccactgtataagtactatgaagagactgggaactacctgaccaagtatagcaaaaaggataatggccccgtgatcaagaagatcaagtactatgggaacaagctgaatgcccatctggacatcacagacgattaccctaacagtcgcaacaaggtggtcaagctgtcactgaagccatacagattcgatgtctatctggacaacggcgtgtataaatttgtgactgtcaagaatctggatgtcatcaaaaaggagaactactatgaagtgaatagcaagtgctacgaagaggctaaaaagctgaaaaagattagcaaccaggcagagttcatcgcctccttttacaacaacgacctgattaagatcaatggcgaactgtatagggtcatcggggtgaacaatgatctgctgaaccgcattgaagtgaatatgattgacatcacttaccgagagtatctggaaaacatgaatgataagcgcccccctcgaattatcaaaacaattgcctctaagactcagagtatcaaaaagtactcaaccgacattctgggaaacctgtatgaggtgaagagcaaaaagcaccctcagattatcaaaaagggc

SEQ ID NO: 26 - DNA, 3159 bp, Artificial Sequence
  Synthetic
atgaagcggaactacatcctgggcctggacatcggcatcaccagcgtgggctacggcatcatcgactacgagacacgggacgtgatcgatgccggcgtgcggctgttcaaagaggccaacgtggaaaacaacgagggcaggcggagcaagagaggcgccagaaggctgaagcggcggaggcggcatagaatccagagagtgaagaagctgctgttcgactacaacctgctgaccgaccacagcgagctgagcggcatcaacccctacgaggccagagtgaagggcctgagccagaagctgagcgaggaagagttctctgccgccctgctgcacctggccaagagaagaggcgtgcacaacgtgaacgaggtggaagaggacaccggcaacgagctgtccaccaaagagcagatcagccggaacagcaaggccctggaagagaaatacgtggccgaactgcagctggaacggctgaagaaagacggcgaagtgcggggcagcatcaacagattcaagaccagcgactacgtgaaagaagccaaacagctgctgaaggtgcagaaggcctaccaccagctggaccagagcttcatcgacacctacatcgacctgctggaaacccggcggacctactatgagggacctggcgagggcagccccttcggctggaaggacatcaaagaatggtacgagatgctgatgggccactgcacctacttccccgaggaactgcggagcgtgaagtacgcctacaacgccgacctgtacaacgccctgaacgacctgaacaatctcgtgatcaccagggacgagaacgagaagctggaatattacgagaagttccagatcatcgagaacgtgttcaagcagaagaagaagcccaccctgaagcagatcgccaaagaaatcctcgtgaacgaagaggatattaagggctacagagtgaccagcaccggcaagcccgagttcaccaacctgaaggtgtaccacgacatcaaggacattaccgcccggaaagagattattgagaacgccgagctgctggatcagattgccaagatcctgaccatctaccagagcagcgaggacatccaggaagaactgaccaatctgaactccgagctgacccaggaagagatcgagcagatctctaatctgaagggctataccggcacccacaacctgagcctgaaggccatcaacctgatcctggacgagctgtggcacaccaacgacaaccagatcgctatcttcaaccggctgaagctggtgcccaagaaggtggacctgtcccagcagaaagagatccccaccaccctggtggacgacttcatcctgagccccgtcgtgaagagaagcttcatccagagcatcaaagtgatcaacgccatcatcaagaagtacggcctgcccaacgacatcattatcgagctggcccgcgagaagaactccaaggacgcccagaaaatgatcaacgagatgcagaagcggaaccggcagaccaacgagcggatcgaggaaatcatccggaccaccggcaaagagaacgccaagtacctgatcgagaagatcaagctgcacgacatgcaggaaggcaagtgcctgtacagcctggaagccatccctctggaagatctgctgaacaaccccttcaactatgaggtggaccacatcatccccagaagcgtgtccttcgacaacagcttcaacaacaaggtgctcgtgaagcaggaagaaaacagcaagaagggcaaccggaccccattccagtacctgagcagcagcgacagcaagatcagctacgaaaccttcaagaagcacatcctgaatctggccaagggcaagggcagaatcagcaagaccaagaaagagtatctgctggaagaacgggacatcaacaggttctccgtgcagaaagacttcatcaaccggaacctggtggataccagatacgccaccagaggcctgatgaacctgctgcggagctacttcagagtgaacaacctggacgtgaaagtgaagtccatcaatggcggcttcaccagctttctgcggcggaagtggaagtttaagaaagagcggaacaaggggtacaagcaccacgccgaggacgccctgatcattgccaacgccgatttcatcttcaaagagtggaagaaactggacaaggccaaaaaagtgatggaaaaccagatgttcgaggaaaagcaggccgagagcatgcccgagatcgaaaccgagcaggagtacaaagagatcttcatcaccccccaccagatcaagcacattaaggacttcaaggactacaagtacagccaccgggtggacaagaagcctaatagagagctgattaacgacaccctgtactccacccggaaggacgacaagggcaacaccctgatcgtgaacaatctgaacggcctgtacgacaaggacaatgacaagctgaaaaagctgatcaacaagagccccgaaaagctgctgatgtaccaccacgacccccagacctaccagaaactgaagctgattatggaacagtacggcgacgagaagaatcccctgtacaagtactacgaggaaaccgggaactacctgaccaagtactccaaaaaggacaacggccccgtgatcaagaagattaagtattacggcaacaaactgaacgcccatctggacatcaccgacgactaccccaacagcagaaacaaggtcgtgaagctgtccctgaagccctacagattcgacgtgtacctggacaatggcgtgtacaagttcgtgaccgtgaagaatctggatgtgatcaaaaaagaaaactactacgaagtgaatagcaagtgctatgaggaagctaagaagctgaagaagatcagcaaccaggccgagtttatcgcctccttctacaacaacgatctgatcaagatcaacggcgagctgtatagagtgatcggcgtgaacaacgacctgctgaaccggatcgaagtgaacatgatcgacatcacctaccgcgagtacctggaaaacatgaacgacaagaggccccccaggatcattaagacaatcgcctccaagacccagagcattaagaagtacagcacagacattctgggcaacctgtatgaagtgaaatctaagaagcaccctcagatcatcaaaaagggc

SEQ ID NO: 27 - DNA, 3159 bp, Artificial Sequence
  Synthetic
atgaagcgcaactacatcctcggactggacatcggcattacctccgtgggatacggcatcatcgattacgaaactagggatgtgatcgacgctggagtcaggctgttcaaagaggcgaacgtggagaacaacgaggggcggcgctcaaagaggggggcccgccggctgaagcgccgccgcagacatagaatccagcgcgtgaagaagctgctgttcgactacaaccttctgaccgaccactccgaactttccggcatcaacccatatgaggctagagtgaagggattgtcccaaaagctgtccgaggaagagttctccgccgcgttgctccacctcgccaagcgcaggggagtgcacaatgtgaacgaagtggaagaagataccggaaacgagctgtccaccaaggagcagatcagccggaactccaaggccctggaagagaaatacgtggcggaactgcaactggagcggctgaagaaagacggagaagtgcgcggctcgatcaaccgcttcaagacctcggactacgtgaaggaggccaagcagctcctgaaagtgcaaaaggcctatcaccaacttgaccagtcctttatcgatacctacatcgatctgctcgagactcggcggacttactacgagggtccaggggagggctccccatttggttggaaggatattaaggagtggtacgaaatgctgatgggacactgcacatacttccctgaggagctgcggagcgtgaaatacgcatacaacgcagacctgtacaacgcgctgaacgacctgaacaatctcgtgatcacccgggacgagaacgaaaagctcgagtattacgaaaagttccagattattgagaacgtgttcaaacagaagaagaagccgacactgaagcagattgccaaggaaatcctcgtgaacgaagaggacatcaagggctatcgagtgacctcaacgggaaagccggagttcaccaatctgaaggtctaccacgacatcaaagacattaccgcccggaaggagatcattgagaacgcggagctgttggaccagattgcgaagattctgaccatctaccaatcctccgaggatattcaggaagaactcaccaacctcaacagcgaactgacccaggaggagatagagcaaatctccaacctgaagggctacaccggaactcataacctgagcctgaaggccatcaacttgatcctggacgagctgtggcacaccaacgataaccagatcgctattttcaatcggctgaagctggtccccaagaaagtggacctctcacaacaaaaggagatccctactacccttgtggacgatttcattctgtcccccgtggtcaagagaagcttcatacagtcaatcaaagtgatcaatgccattatcaagaaatacggtctgcccaacgacattatcattgagctcgcccgcgagaagaactcgaaggacgcccagaagatgattaacgaaatgcagaagaggaaccgacagactaacgaacggatcgaagaaatcatccggaccaccgggaaggaaaacgcgaagtacctgatcgaaaagatcaagctccatgacatgcaggaaggaaagtgtctgtactcgctggaggccattccgctggaggacttgctgaacaacccttttaactacgaagtggatcatatcattccgaggagcgtgtcattcgacaattccttcaacaacaaggtcctcgtgaagcaggaggaaaactcgaagaagggaaaccgcacgccgttccagtacctgagcagcagcgactccaagatttcctacgaaaccttcaagaagcacatcctcaacctggcaaaggggaagggtcgcatctccaagaccaagaaggaatatctgctggaagaaagagacatcaacagattctccgtgcaaaaggacttcatcaaccgcaacctcgtggatactagatacgctactcggggtctgatgaacctcctgagaagctactttagagtgaacaatctggacgtgaaggtcaagtcgattaacggaggtttcacctccttcctgcggcgcaagtggaagttcaagaaggaacggaacaagggctacaagcaccacgccgaggacgccctgatcattgccaacgccgacttcatcttcaaagaatggaagaaacttgacaaggctaagaaggtcatggaaaaccagatgttcgaagaaaagcaggccgagtctatgcctgaaatcgagactgaacaggagtacaaggaaatctttattacgccacaccagatcaaacacatcaaggatttcaaggattacaagtactcacatcgcgtggacaaaaagccgaacagggaactgatcaacgacaccctctactccacccggaaggatgacaaagggaataccctcatcgtcaacaaccttaacggcctgtacgacaaggacaacgataagctgaagaagctcattaacaagtcgcccgaaaagttgctgatgtaccaccacgaccctcagacttaccagaagctcaagctgatcatggagcagtatggggacgagaaaaacccgttgtacaagtactacgaagaaactgggaattatctgactaagtactccaagaaagataacggccccgtgattaagaagattaagtactacggcaacaagctgaacgcccatctggacatcaccgatgactaccctaattcccgcaacaaggtcgtcaagctgagcctcaagccctaccggtttgatgtgtaccttgacaatggagtgtacaagttcgtgactgtgaagaaccttgacgtgatcaagaaggagaactactacgaagtcaactccaagtgctacgaggaagcaaagaagttgaagaagatctcgaaccaggccgagttcattgcctccttctataacaacgacctgattaagatcaacggcgaactgtaccgcgtcattggcgtgaacaacgatctcctgaaccgcatcgaagtgaacatgatcgacatcacttaccgggaatacctggagaatatgaacgacaagcgcccgccccggatcattaagactatcgcctcaaagacccagtcgatcaagaagtacagcaccgacatcctgggcaacctgtacgaggtcaaatcgaagaagcacccccagatcatcaagaaggga

SEQ ID NO: 28 - DNA, 3255 bp, Artificial Sequence
  Synthetic
atggccccaaagaagaagcggaaggtcggtatccacggagtcccagcagccaagcggaactacatcctgggcctggacatcggcatcaccagcgtgggctacggcatcatcgactacgagacacgggacgtgatcgatgccggcgtgcggctgttcaaagaggccaacgtggaaaacaacgagggcaggcggagcaagagaggcgccagaaggctgaagcggcggaggcggcatagaatccagagagtgaagaagctgctgttcgactacaacctgctgaccgaccacagcgagctgagcggcatcaacccctacgaggccagagtgaagggcctgagccagaagctgagcgaggaagagttctctgccgccctgctgcacctggccaagagaagaggcgtgcacaacgtgaacgaggtggaagaggacaccggcaacgagctgtccaccagagagcagatcagccggaacagcaaggccctggaagagaaatacgtggccgaactgcagctggaacggctgaagaaagacggcgaagtgcggggcagcatcaacagattcaagaccagcgactacgtgaaagaagccaaacagctgctgaaggtgcagaaggcctaccaccagctggaccagagcttcatcgacacctacatcgacctgctggaaacccggcggacctactatgagggacctggcgagggcagccccttcggctggaaggacatcaaagaatggtacgagatgctgatgggccactgcacctacttccccgaggaactgcggagcgtgaagtacgcctacaacgccgacctgtacaacgccctgaacgacctgaacaatctcgtgatcaccagggacgagaacgagaagctggaatattacgagaagttccagatcatcgagaacgtgttcaagcagaagaagaagcccaccctgaagcagatcgccaaagaaatcctcgtgaacgaagaggatattaagggctacagagtgaccagcaccggcaagcccgagttcaccaacctgaaggtgtaccacgacatcaaggacattaccgcccggaaagagattattgagaacgccgagctgctggatcagattgccaagatcctgaccatctaccagagcagcgaggacatccaggaagaactgaccaatctgaactccgagctgacccaggaagagatcgagcagatctctaatctgaagggctataccggcacccacaacctgagcctgaaggccatcaacctgatcctggacgagctgtggcacaccaacgacaaccagatcgctatcttcaaccggctgaagctggtgcccaagaaggtggacctgtcccagcagaaagagatccccaccaccctggtggacgacttcatcctgagccccgtcgtgaagagaagcttcatccagagcatcaaagtgatcaacgccatcatcaagaagtacggcctgcccaacgacatcattatcgagctggcccgcgagaagaactccaaggacgcccagaaaatgatcaacgagatgcagaagcggaaccggcagaccaacgagcggatcgaggaaatcatccggaccaccggcaaagagaacgccaagtacctgatcgagaagatcaagctgcacgacatgcaggaaggcaagtgcctgtacagcctggaagccatccctctggaagatctgctgaacaaccccttcaactatgaggtggaccacatcatccccagaagcgtgtccttcgacaacagcttcaacaacaaggtgctcgtgaagcaggaagaaaacagcaagaagggcaaccggaccccattccagtacctgagcagcagcgacagcaagatcagctacgaaaccttcaagaagcacatcctgaatctggccaagggcaagggcagaatcagcaagaccaagaaagagtatctgctggaagaacgggacatcaacaggttctccgtgcagaaagacttcatcaaccggaacctggtggataccagatacgccaccagaggcctgatgaacctgctgcggagctacttcagagtgaacaacctggacgtgaaagtgaagtccatcaatggcggcttcaccagctttctgcggcggaagtggaagtttaagaaagagcggaacaaggggtacaagcaccacgccgaggacgccctgatcattgccaacgccgatttcatcttcaaagagtggaagaaactggacaaggccaaaaaagtgatggaaaaccagatgttcgaggaaaggcaggccgagagcatgcccgagatcgaaaccgagcaggagtacaaagagatcttcatcaccccccaccagatcaagcacattaaggacttcaaggactacaagtacagccaccgggtggacaagaagcctaatagagagctgattaacgacaccctgtactccacccggaaggacgacaagggcaacaccctgatcgtgaacaatctgaacggcctgtacgacaaggacaatgacaagctgaaaaagctgatcaacaagagccccgaaaagctgctgatgtaccaccacgacccccagacctaccagaaactgaagctgattatggaacagtacggcgacgagaagaatcccctgtacaagtactacgaggaaaccgggaactacctgaccaagtactccaaaaaggacaacggccccgtgatcaagaagattaagtattacggcaacaaactgaacgcccatctggacatcaccgacgactaccccaacagcagaaacaaggtcgtgaagctgtccctgaagccctacagattcgacgtgtacctggacaatggcgtgtacaagttcgtgaccgtgaagaatctggatgtgatcaaaaaagaaaactactacgaagtgaatagcaagtgctatgaggaagctaagaagctgaagaagatcagcaaccaggccgagtttatcgcctccttctacaacaacgatctgatcaagatcaacggcgagctgtatagagtgatcggcgtgaacaacgacctgctgaaccggatcgaagtgaacatgatcgacatcacctaccgcgagtacctggaaaacatgaacgacaagaggccccccaggatcattaagacaatcgcctccaagacccagagcattaagaagtacagcacagacattctgggcaacctgtatgaagtgaaatctaagaagcaccctcagatcatcaaaaagggcaaaaggccggcggccacgaaaaaggccggccaggcaaaaaagaaaaag

SEQ ID NO: 29 - DNA, 3242 bp, Artificial Sequence
  Synthetic
accggtgccaccatgtacccatacgatgttccagattacgcttcgccgaagaaaaagcgcaaggtcgaagcgtccatgaaaaggaactacattctggggctggacatcgggattacaagcgtggggtatgggattattgactatgaaacaagggacgtgatcgacgcaggcgtcagactgttcaaggaggccaacgtggaaaacaatgagggacggagaagcaagaggggagccaggcgcctgaaacgacggagaaggcacagaatccagagggtgaagaaactgctgttcgattacaacctgctgaccgaccattctgagctgagtggaattaatccttatgaagccagggtgaaaggcctgagtcagaagctgtcagaggaagagttttccgcagctctgctgcacctggctaagcgccgaggagtgcataacgtcaatgaggtggaagaggacaccggcaacgagctgtctacaaaggaacagatctcacgcaatagcaaagctctggaagagaagtatgtcgcagagctgcagctggaacggctgaagaaagatggcgaggtgagagggtcaattaataggttcaagacaagcgactacgtcaaagaagccaagcagctgctgaaagtgcagaaggcttaccaccagctggatcagagcttcatcgatacttatatcgacctgctggagactcggagaacctactatgagggaccaggagaagggagccccttcggatggaaagacatcaaggaatggtacgagatgctgatgggacattgcacctattttccagaagagctgagaagcgtcaagtacgcttataacgcagatcttacaacgccctgaatgacctgaacaacctggtcatcaccagggatgaaaacgagaaactggaatactatgagaagttccagatcatcgaaaacgtgtttaagcagaagaaaaagcctacactgaaacagattgctaaggagatcctggtcaacgaagaggacatcaagggctaccgggtgacaagcactggaaaaccagagttcaccaatctgaaagtgtatcacgatattaaggacatcacagcacggaaagaaatcattgagaacgccgaactgctggatcagattgctaagatcctgactatctaccagagctccgaggacatccaggaagagctgactaacctgaacagcgagctgacccaggaagagatcgaacagattagtaatctgaaggggtacaccggaacacacaacctgtccctgaaagctatcaatctgattctggatgagctgtggcatacaaacgacaatcagattgcaatctttaaccggctgaagctggtcccaaaaaaggtggacctgagtcagcagaaagagatcccaaccacactggtggacgatttcattctgtcacccgtggtcaagcggagcttcatccagagcatcaaagtgatcaacgccatcatcaagaagtacggcctgcccaatgatatcattatcgagctggctagggagaagaacagcaaggacgcacagaagatgatcaatgagatgcagaaacgaaaccggcagaccaatgaacgcattgaagagattatccgaactaccgggaaagagaacgcaaagtacctgattgaaaaaatcaagctgcacgatatgcaggagggaaagtgtctgtattctctggaggccatccccctggaggacctgctgaacaatccattcaactacgaggtcgatcatattatccccagaagcgtgtccttcgacaattcctttaacaacaaggtgctggtcaagcaggaagagaactctaaaaagggcaataggactcctttccagtacctgtctagttcagattccaagatctcttacgaaacctttaaaaagcacattctgaatctggccaaaggaaagggccgcatcagcaagaccaaaaaggagtacctgctggaagagcgggacatcaacagattctccgtccagaaggattttattaaccggaatctggtggacacaagatacgctactcgcggcctgatgaatctgctgcgatcctatttccgggtgaacaatctggatgtgaaagtcaagtccatcaacggcgggttcacatcttttctgaggcgcaaatggaagtttaaaaaggagcgcaacaaagggtacaagcaccatgccgaagatgctctgattatcgcaaatgccgacttcatctttaaggagtggaaaaagctggacaaagccaagaaagtgatggagaaccagatgttcgaagagaagcaggccgaatctatgcccgaaatcgagacagaacaggagtacaaggagattttcatcactcctcaccagatcaagcatatcaaggatttcaaggactacaagtactctcaccgggtggataaaaagcccaacagagagctgatcaatgacaccctgtatagtacaagaaaagacgataaggggaataccctgattgtgaacaatctgaacggactgtacgacaaagataatgacaagctgaaaaagctgatcaacaaaagtcccgagaagctgctgatgtaccaccatgatcctcagacatatcagaaactgaagctgattatggagcagtacggcgacgagaagaacccactgtataagtactatgaagagactgggaactacctgaccaagtatagcaaaaaggataatggccccgtgatcaagaagatcaagtactatgggaacaagctgaatgcccatctggacatcacagacgattaccctaacagtcgcaacaaggtggtcaagctgtcactgaagccatacagattcgatgtctatctggacaacggcgtgtataaatttgtgactgtcaagaatctggatgtcatcaaaaaggagaactactatgaagtgaatagcaagtgctacgaagaggctaaaaagctgaaaaagattagcaaccaggcagagttcatcgcctccttttacaacaacgacctgattaagatcaatggcgaactgtatagggtcatcggggtgaacaatgatctgctgaaccgcattgaagtgaatatgattgacatcacttaccgagagtatctggaaaacatgaatgataagcgcccccctcgaattatcaaaacaattgcctctaagactcagagtatcaaaaagtactcaaccgacattctgggaaacctgtatgaggtgaagagcaaaaagcaccctcagattatcaaaaagggctaagaattc

SEQ ID NO: 30 - DNA, 3255 bp, Artificial Sequence
  Synthetic
atggccccaaagaagaagcggaaggtcggtatccacggagtcccagcagccaagcggaactacatcctgggcctggacatcggcatcaccagcgtgggctacggcatcatcgactacgagacacgggacgtgatcgatgccggcgtgcggctgttcaaagaggccaacgtggaaaacaacgagggcaggcggagcaagagaggcgccagaaggctgaagcggcggaggcggcatagaatccagagagtgaagaagctgctgttcgactacaacctgctgaccgaccacagcgagctgagcggcatcaacccctacgaggccagagtgaagggcctgagccagaagctgagcgaggaagagttctctgccgccctgctgcacctggccaagagaagaggcgtgcacaacgtgaacgaggtggaagaggacaccggcaacgagctgtccaccaaagagcagatcagccggaacagcaaggccctggaagagaaatacgtggccgaactgcagctggaacggctgaagaaagacggcgaagtgcggggcagcatcaacagattcaagaccagcgactacgtgaaagaagccaaacagctgctgaaggtgcagaaggcctaccaccagctggaccagagcttcatcgacacctacatcgacctgctggaaacccggcggacctactatgagggacctggcgagggcagccccttcggctggaaggacatcaaagaatggtacgagatgctgatgggccactgcacctacttccccgaggaactgcggagcgtgaagtacgcctacaacgccgacctgtacaacgccctgaacgacctgaacaatctcgtgatcaccagggacgagaacgagaagctggaatattacgagaagttccagatcatcgagaacgtgttcaagcagaagaagaagcccaccctgaagcagatcgccaaagaaatcctcgtgaacgaagaggatattaagggctacagagtgaccagcaccggcaagcccgagttcaccaacctgaaggtgtaccacgacatcaaggacattaccgcccggaaagagattattgagaacgccgagctgctggatcagattgccaagatcctgaccatctaccagagcagcgaggacatccaggaagaactgaccaatctgaactccgagctgacccaggaagagatcgagcagatctctaatctgaagggctataccggcacccacaacctgagcctgaaggccatcaacctgatcctggacgagctgtggcacaccaacgacaaccagatcgctatcttcaaccggctgaagctggtgcccaagaaggtggacctgtcccagcagaaagagatccccaccaccctggtggacgacttcatcctgagccccgtcgtgaagagaagcttcatccagagcatcaaagtgatcaacgccatcatcaagaagtacggcctgcccaacgacatcattatcgagctggcccgcgagaagaactccaaggacgcccagaaaatgatcaacgagatgcagaagcggaaccggcagaccaacgagcggatcgaggaaatcatccggaccaccggcaaagagaacgccaagtacctgatcgagaagatcaagctgcacgacatgcaggaaggcaagtgcctgtacagcctggaagccatccctctggaagatctgctgaacaaccccttcaactatgaggtggaccacatcatccccagaagcgtgtccttcgacaacagcttcaacaacaaggtgctcgtgaagcaggaagaaaacagcaagaagggcaaccggaccccattccagtacctgagcagcagcgacagcaagatcagctacgaaaccttcaagaagcacatcctgaatctggccaagggcaagggcagaatcagcaagaccaagaaagagtatctgctggaagaacgggacatcaacaggttctccgtgcagaaagacttcatcaaccggaacctggtggataccagatacgccaccagaggcctgatgaacctgctgcggagctacttcagagtgaacaacctggacgtgaaagtgaagtccatcaatggcggcttcaccagctttctgcggcggaagtggaagtttaagaaagagcggaacaaggggtacaagcaccacgccgaggacgccctgatcattgccaacgccgatttcatcttcaaagagtggaagaaactggacaaggccaaaaaagtgatggaaaaccagatgttcgaggaaaagcaggccgagagcatgcccgagatcgaaaccgagcaggagtacaaagagatcttcatcaccccccaccagatcaagcacattaaggacttcaaggactacaagtacagccaccgggtggacaagaagcctaatagagagctgattaacgacaccctgtactccacccggaaggacgacaagggcaacaccctgatcgtgaacaatctgaacggcctgtacgacaaggacaatgacaagctgaaaaagctgatcaacaagagccccgaaaagctgctgatgtaccaccacgacccccagacctaccagaaactgaagctgattatggaacagtacggcgacgagaagaatcccctgtacaagtactacgaggaaaccgggaactacctgaccaagtactccaaaaaggacaacggccccgtgatcaagaagattaagtattacggcaacaaactgaacgcccatctggacatcaccgacgactaccccaacagcagaaacaaggtcgtgaagctgtccctgaagccctacagattcgacgtgtacctggacaatggcgtgtacaagttcgtgaccgtgaagaatctggatgtgatcaaaaaagaaaactactacgaagtgaatagcaagtgctatgaggaagctaagaagctgaagaagatcagcaaccaggccgagtttatcgcctccttctacaacaacgatctgatcaagatcaacggcgagctgtatagagtgatcggcgtgaacaacgacctgctgaaccggatcgaagtgaacatgatcgacatcacctaccgcgagtacctggaaaacatgaacgacaagaggccccccaggatcattaagacaatcgcctccaagacccagagcattaagaagtacagcacagacattctgggcaacctgtatgaagtgaaatctaagaagcaccctcagatcatcaaaaagggcaaaaggccggcggccacgaaaaaggccggccaggcaaaaaagaaaaag

SEQ ID NO: 31 - DNA, 3156 bp, Artificial Sequence
  Synthetic
aagcggaactacatcctgggcctggacatcggcatcaccagcgtgggctacggcatcatcgactacgagacacgggacgtgatcgatgccggcgtgcggctgttcaaagaggccaacgtggaaaacaacgagggcaggcggagcaagagaggcgccagaaggctgaagcggcggaggcggcatagaatccagagagtgaagaagctgctgttcgactacaacctgctgaccgaccacagcgagctgagcggcatcaacccctacgaggccagagtgaagggcctgagccagaagctgagcgaggaagagttctctgccgccctgctgcacctggccaagagaagaggcgtgcacaacgtgaacgaggtggaagaggacaccggcaacgagctgtccaccaaagagcagatcagccggaacagcaaggccctggaagagaaatacgtggccgaactgcagctggaacggctgaagaaagacggcgaagtgcggggcagcatcaacagattcaagaccagcgactacgtgaaagaagccaaacagctgctgaaggtgcagaaggcctaccaccagctggaccagagcttcatcgacacctacatcgacctgctggaaacccggcggacctactatgagggacctggcgagggcagccccttcggctggaaggacatcaaagaatggtacgagatgctgatgggccactgcacctacttccccgaggaactgcggagcgtgaagtacgcctacaacgccgacctgtacaacgccctgaacgacctgaacaatctcgtgatcaccagggacgagaacgagaagctggaatattacgagaagttccagatcatcgagaacgtgttcaagcagaagaagaagcccaccctgaagcagatcgccaaagaaatcctcgtgaacgaagaggatattaagggctacagagtgaccagcaccggcaagcccgagttcaccaacctgaaggtgtaccacgacatcaaggacattaccgcccggaaagagattattgagaacgccgagctgctggatcagattgccaagatcctgaccatctaccagagcagcgaggacatccaggaagaactgaccaatctgaactccgagctgacccaggaagagatcgagcagatctctaatctgaagggctataccggcacccacaacctgagcctgaaggccatcaacctgatcctggacgagctgtggcacaccaacgacaaccagatcgctatcttcaaccggctgaagctggtgcccaagaaggtggacctgtcccagcagaaagagatccccaccaccctggtggacgacttcatcctgagccccgtcgtgaagagaagcttcatccagagcatcaaagtgatcaacgccatcatcaagaagtacggcctgcccaacgacatcattatcgagctggcccgcgagaagaactccaaggacgcccagaaaatgatcaacgagatgcagaagcggaaccggcagaccaacgagcggatcgaggaaatcatccggaccaccggcaaagagaacgccaagtacctgatcgagaagatcaagctgcacgacatgcaggaaggcaagtgcctgtacagcctggaagccatccctctggaagatctgctgaacaaccccttcaactatgaggtggaccacatcatccccagaagcgtgtccttcgacaacagcttcaacaacaaggtgctcgtgaagcaggaagaaaacagcaagaagggcaaccggaccccattccagtacctgagcagcagcgacagcaagatcagctacgaaaccttcaagaagcacatcctgaatctggccaagggcaagggcagaatcagcaagaccaagaaagagtatctgctggaagaacgggacatcaacaggttctccgtgcagaaagacttcatcaaccggaacctggtggataccagatacgccaccagaggcctgatgaacctgctgcggagctacttcagagtgaacaacctggacgtgaaagtgaagtccatcaatggcggcttcaccagctttctgcggcggaagtggaagtttaagaaagagcggaacaaggggtacaagcaccacgccgaggacgccctgatcattgccaacgccgatttcatcttcaaagagtggaagaaactggacaaggccaaaaaagtgatggaaaaccagatgttcgaggaaaagcaggccgagagcatgcccgagatcgaaaccgagcaggagtacaaagagatcttcatcaccccccaccagatcaagcacattaaggacttcaaggactacaagtacagccaccgggtggacaagaagcctaatagagagctgattaacgacaccctgtactccacccggaaggacgacaagggcaacaccctgatcgtgaacaatctgaacggcctgtacgacaaggacaatgacaagctgaaaaagctgatcaacaagagccccgaaaagctgctgatgtaccaccacgacccccagacctaccagaaactgaagctgattatggaacagtacggcgacgagaagaatcccctgtacaagtactacgaggaaaccgggaactacctgaccaagtactccaaaaaggacaacggccccgtgatcaagaagattaagtattacggcaacaaactgaacgcccatctggacatcaccgacgactaccccaacagcagaaacaaggtcgtgaagctgtccctgaagccctacagattcgacgtgtacctggacaatggcgtgtacaagttcgtgaccgtgaagaatctggatgtgatcaaaaaagaaaactactacgaagtgaatagcaagtgctatgaggaagctaagaagctgaagaagatcagcaaccaggccgagtttatcgcctccttctacaacaacgatctgatcaagatcaacggcgagctgtatagagtgatcggcgtgaacaacgacctgctgaaccggatcgaagtgaacatgatcgacatcacctaccgcgagtacctggaaaacatgaacgacaagaggccccccaggatcattaagacaatcgcctccaagacccagagcattaagaagtacagcacagacattctgggcaacctgtatgaagtgaaatctaagaagcaccctcagatcatcaaaaagggc

SEQ ID NO: 32 - DNA, 7009 bp, Artificial Sequence
  Synthetic
ctaaattgtaagcgttaatattttgttaaaattcgcgttaaatttttgttaaatcagctcattttttaaccaataggccgaaatcggcaaaatcccttataaatcaaaagaatagaccgagatagggttgagtgttgttccagtttggaacaagagtccactattaaagaacgtggactccaacgtcaaagggcgaaaaaccgtctatcagggcgatggcccactacgtgaaccatcaccctaatcaagttttttggggtcgaggtgccgtaaagcactaaatcggaaccctaaagggagcccccgatttagagcttgacggggaaagccggcgaacgtggcgagaaaggaagggaagaaagcgaaaggagcgggcgctagggcgctggcaagtgtagcggtcacgctgcgcgtaaccaccacacccgccgcgcttaatgcgccgctacagggcgcgtcccattcgccattcaggctgcgcaactgttgggaagggcgatcggtgcgggcctcttcgctattacgccagctggcgaaagggggatgtgctgcaaggcgattaagttgggtaacgccagggttttcccagtcacgacgttgtaaaacgacggccagtgagcgcgcgtaatacgactcactatagggcgaattgggtacctttaattctagtactatgcatgcgttgacattgattattgactagttattaatagtaatcaattacggggtcattagttcatagcccatatatggagttccgcgttacataacttacggtaaatggcccgcctggctgaccgcccaacgacccccgcccattgacgtcaataatgacgtatgttcccatagtaacgccaatagggactttccattgacgtcaatgggtggagtatttacggtaaactgcccacttggcagtacatcaagtgtatcatatgccaagtacgccccctattgacgtcaatgacggtaaatggcccgcctggcattatgcccagtacatgaccttatgggactttcctacttggcagtacatctacgtattagtcatcgctattaccatggtgatgcggttttggcagtacatcaatgggcgtggatagcggtttgactcacggggatttccaagtctccaccccattgacgtcaatgggagtttgttttggcaccaaaatcaacgggactttccaaaatgtcgtaacaactccgccccattgacgcaaatgggcggtaggcgtgtacggtgggaggtctatataagcagagctctctggctaactaccggtgccaccatgaaaaggaactacattctggggctggacatcgggattacaagcgtggggtatgggattattgactatgaaacaagggacgtgatcgacgcaggcgtcagactgttcaaggaggccaacgtggaaaacaatgagggacggagaagcaagaggggagccaggcgcctgaaacgacggagaaggcacagaatccagagggtgaagaaactgctgttcgattacaacctgctgaccgaccattctgagctgagtggaattaatccttatgaagccagggtgaaaggcctgagtcagaagctgtcagaggaagagttttccgcagctctgctgcacctggctaagcgccgaggagtgcataacgtcaatgaggtggaagaggacaccggcaacgagctgtctacaaaggaacagatctcacgcaatagcaaagctctggaagagaagtatgtcgcagagctgcagctggaacggctgaagaaagatggcgaggtgagagggtcaattaataggttcaagacaagcgactacgtcaaagaagccaagcagctgctgaaagtgcagaaggcttaccaccagctggatcagagcttcatcgatacttatatcgacctgctggagactcggagaacctactatgagggaccaggagaagggagccccttcggatggaaagacatcaaggaatggtacgagatgctgatgggacattgcacctattttccagaagagctgagaagcgtcaagtacgcttataacgcagatctgtacaacgccctgaatgacctgaacaacctggtcatcaccagggatgaaaacgagaaactggaatactatgagaagttccagatcatcgaaaacgtgtttaagcagaagaaaaagcctacactgaaacagattgctaaggagatcctggtcaacgaagaggacatcaagggctaccgggtgacaagcactggaaaaccagagttcaccaatctgaaagtgtatcacgatattaaggacatcacagcacggaaagaaatcattgagaacgccgaactgctggatcagattgctaagatcctgactatctaccagagctccgaggacatccaggaagagctgactaacctgaacagcgagctgacccaggaagagatcgaacagattagtaatctgaaggggtacaccggaacacacaacctgtccctgaaagctatcaatctgattctggatgagctgtggcatacaaacgacaatcagattgcaatctttaaccggctgaagctggtcccaaaaaaggtggacctgagtcagcagaaagagatcccaaccacactggtggacgatttcattctgtcacccgtggtcaagcggagcttcatccagagcatcaaagtgatcaacgccatcatcaagaagtacggcctgcccaatgatatcattatcgagctggctagggagaagaacagcaaggacgcacagaagatgatcaatgagatgcagaaacgaaaccggcagaccaatgaacgcattgaagagattatccgaactaccgggaaagagaacgcaaagtacctgattgaaaaaatcaagctgcacgatatgcaggagggaaagtgtctgtattctctggaggccatccccctggaggacctgctgaacaatccattcaactacgaggtcgatcatattatccccagaagcgtgtccttcgacaattcctttaacaacaaggtgctggtcaagcaggaagagaactctaaaaagggcaataggactcctttccagtacctgtctagttcagattccaagatctcttacgaaacctttaaaaagcacattctgaatctggccaaaggaaagggccgcatcagcaagaccaaaaaggagtacctgctggaagagcgggacatcaacagattctccgtccagaaggattttattaaccggaatctggtggacacaagatacgctactcgcggcctgatgaatctgctgcgatcctatttccgggtgaacaatctggatgtgaaagtcaagtccatcaacggcgggttcacatcttttctgaggcgcaaatggaagtttaaaaaggagcgcaacaaagggtacaagcaccatgccgaagatgctctgattatcgcaaatgccgacttcatctttaaggagtggaaaaagctggacaaagccaagaaagtgatggagaaccagatgttcgaagagaagcaggccgaatctatgcccgaaatcgagacagaacaggagtacaaggagattttcatcactcctcaccagatcaagcatatcaaggatttcaaggactacaagtactctcaccgggtggataaaaagcccaacagagagctgatcaatgacaccctgtatagtacaagaaaagacgataaggggaataccctgattgtgaacaatctgaacggactgtacgacaaagataatgacaagctgaaaaagctgatcaacaaaagtcccgagaagctgctgatgtaccaccatgatcctcagacatatcagaaactgaagctgattatggagcagtacggcgacgagaagaacccactgtataagtactatgaagagactgggaactacctgaccaagtatagcaaaaaggataatggccccgtgatcaagaagatcaagtactatgggaacaagctgaatgcccatctggacatcacagacgattaccctaacagtcgcaacaaggtggtcaagctgtcactgaagccatacagattcgatgtctatctggacaacggcgtgtataaatttgtgactgtcaagaatctggatgtcatcaaaaaggagaactactatgaagtgaatagcaagtgctacgaagaggctaaaaagctgaaaaagattagcaaccaggcagagttcatcgcctccttttacaacaacgacctgattaagatcaatggcgaactgtatagggtcatcggggtgaacaatgatctgctgaaccgcattgaagtgaatatgattgacatcacttaccgagagtatctggaaaacatgaatgataagcgcccccctcgaattatcaaaacaattgcctctaagactcagagtatcaaaaagtactcaaccgacattctgggaaacctgtatgaggtgaagagcaaaaagcaccctcagattatcaaaaagggcagcggaggcaagcgtcctgctgctactaagaaagctggtcaagctaagaaaaagaaaggatcctacccatacgatgttccagattacgcttaagaattcctagagctcgctgatcagcctcgactgtgccttctagttgccagccatctgttgtttgcccctcccccgtgccttccttgaccctggaaggtgccactcccactgtcctttcctaataaaatgaggaaattgcatcgcattgtctgagtaggtgtcattctattctggggggtggggtggggcaggacagcaagggggaggattgggaagagaatagcaggcatgctggggaggtagcggccgcccgcggtggagctccagcttttgttccctttagtgagggttaattgcgcgcttggcgtaatcatggtcatagctgtttcctgtgtgaaattgttatccgctcacaattccacacaacatacgagccggaagcataaagtgtaaagcctggggtgcctaatgagtgagctaactcacattaattgcgttgcgctcactgcccgctttccagtcgggaaacctgtcgtgccagctgcattaatgaatcggccaacgcgcggggagaggcggtttgcgtattgggcgctcttccgcttcctcgctcactgactcgctgcgctcggtcgttcggctgcggcgagcggtatcagctcactcaaaggcggtaatacggttatccacagaatcaggggataacgcaggaaagaacatgtgagcaaaaggccagcaaaaggccaggaaccgtaaaaaggccgcgttgctggcgtttttccataggctccgcccccctgacgagcatcacaaaaatcgacgctcaagtcagaggtggcgaaacccgacaggactataaagataccaggcgtttccccctggaagctccctcgtgcgctctcctgttccgaccctgccgcttaccggatacctgtccgcctttctcccttcgggaagcgtggcgctttctcatagctcacgctgtaggtatctcagttcggtgtaggtcgttcgctccaagctgggctgtgtgcacgaaccccccgttcagcccgaccgctgcgccttatccggtaactatcgtcttgagtccaacccggtaagacacgacttatcgccactggcagcagccactggtaacaggattagcagagcgaggtatgtaggcggtgctacagagttcttgaagtggtggcctaactacggctacactagaaggacagtatttggtatctgcgctctgctgaagccagttaccttcggaaaaagagttggtagctcttgatccggcaaacaaaccaccgctggtagcggtggtttttttgtttgcaagcagcagattacgcgcagaaaaaaaggatctcaagaagatcctttgatcttttctacggggtctgacgctcagtggaacgaaaactcacgttaagggattttggtcatgagattatcaaaaaggatcttcacctagatccttttaaattaaaaatgaagttttaaatcaatctaaagtatatatgagtaaacttggtctgacagttaccaatgcttaatcagtgaggcacctatctcagcgatctgtctatttcgttcatccatagttgcctgactccccgtcgtgtagataactacgatacgggagggcttaccatctggccccagtgctgcaatgataccgcgagacccacgctcaccggctccagatttatcagcaataaaccagccagccggaagggccgagcgcagaagtggtcctgcaactttatccgcctccatccagtctattaattgttgccgggaagctagagtaagtagttcgccagttaatagtttgcgcaacgttgttgccattgctacaggcatcgtggtgtcacgctcgtcgtttggtatggcttcattcagctccggttcccaacgatcaaggcgagttacatgatcccccatgttgtgcaaaaaagcggttagctccttcggtcctccgatcgttgtcagaagtaagttggccgcagtgttatcactcatggttatggcagcactgcataattctcttactgtcatgccatccgtaagatgcttttctgtgactggtgagtactcaaccaagtcattctgagaatagtgtatgcggcgaccgagttgctcttgcccggcgtcaatacgggataataccgcgccacatagcagaactttaaaagtgctcatcattggaaaacgttcttcggggcgaaaactctcaaggatcttaccgctgttgagatccagttcgatgtaacccactcgtgcacccaactgatcttcagcatcttttactttcaccagcgtttctgggtgagcaaaaacaggaaggcaaaatgccgcaaaaaagggaataagggcgacacggaaatgttgaatactcatactcttcctttttcaatattattgaagcatttatcagggttattgtctcatgagcggatacatatttgaatgtatttagaaaaataaacaaataggggttccgcgcacatttccccgaaaagtgccac

SEQ ID NO: 33 - protein, 2414 aa, Homo sapiens
MAENVVEPGPPSAKRPKLSSPALSASASDGTDFGSLFDLEHDLPDELINSTELGLTNGGDINQLQTSLGMVQDAASKHKQLSELLRSGSSPNLNMGVGGPGQVMASQAQQSSPGLGLINSMVKSPMTQAGLTSPNMGMGTSGPNQGPTQSTGMMNSPVNQPAMGMNTGMNAGMNPGMLAAGNGQGIMPNQVMNGSIGAGRGRQNMQYPNPGMGSAGNLLTEPLQQGSPQMGGQTGLRGPQPLKMGMMNNPNPYGSPYTQNPGQQIGASGLGLQIQTKTVLSNNLSPFAMDKKAVPGGGMPNMGQQPAPQVQQPGLVTPVAQGMGSGAHTADPEKRKLIQQQLVLLLHAHKCQRREQANGEVRQCNLPHCRTMKNVLNHMTHCQSGKSCQVAHCASSRQIISHWKNCTRHDCPVCLPLKNAGDKRNQQPILTGAPVGLGNPSSLGVGQQSAPNLSTVSQIDPSSIERAYAALGLPYQVNQMPTQPQVQAKNQQNQQPGQSPQGMRPMSNMSASPMGVNGGVGVQTPSLLSDSMLHSAINSQNPMMSENASVPSMGPMPTAAQPSTTGIRKQWHEDITQDLRNHLVHKLVQAIFPTPDPAALKDRRMENLVAYARKVEGDMYESANNRAEYYHLLAEKIYKIQKELEEKRRTRLQKQNMLPNAAGMVPVSMNPGPNMGQPQPGMTSNGPLPDPSMIRGSVPNQMMPRITPQSGLNQFGQMSMAQPPIVPRQTPPLQHHGQLAQPGALNPPMGYGPRMQQPSNQGQFLPQTQFPSQGMNVTNIPLAPSSGQAPVSQAQMSSSSCPVNSPIMPPGSQGSHIHCPQLPQPALHQNSPSPVPSRTPTPHHTPPSIGAQQPPATTIPAPVPTPPAMPPGPQSQALHPPPRQTPTPPTTQLPQQVQPSLPAAPSADQPQQQPRSQQSTAASVPTPTAPLLPPQPATPLSQPAVSIEGQVSNPPSTSSTEVNSQAIAEKQPSQEVKMEAKMEVDQPEPADTQPEDISESKVEDCKMESTETEERSTELKTEIKEEEDQPSTSATQSSPAPGQSKKKIFKPEELRQALMPTLEALYRQDPESLPFRQPVDPQLLGIPDYFDIVKSPMDLSTIKRKLDTGQYQEPWQYVDDIWLMFNNAWLYNRKTSRVYKYCSKLSEVFEQEIDPVMQSLGYCCGRKLEFSPQTLCCYGKQLCTIPRDATYYSYQNRYHFCEKCFNEIQGESVSLGDDPSQPQTTINKEQFSKRKNDTLDPELFVECTECGRKMHQICVLHHEIIWPAGFVCDGCLKKSARTRKENKFSAKRLPSTRLGTFLENRVNDFLRRQNHPESGEVTVRVVHASDKTVEVKPGMKARFVDSGEMAESFPYRTKALFAFEEIDGVDLCFFGMHVQEYGSDCPPPNQRRVYISYLDSVHFFRPKCLRTAVYHEILIGYLEYVKKLGYTTGHIWACPPSEGDDYIFHCHPPDQKIPKPKRLQEWYKKMLDKAVSERIVHDYKDIFKQATEDRLTSAKELPYFEGDFWPNVLEESIKELEQEEEERKREENTSNESTDVTKGDSKNAKKKNNKKTSKNKSSLSRGNKKKPGMPNVSNDLSQKLYATMEKHKEVFFVIRLIAGPAANSLPPIVDPDPLIPCDLMDGRDAFLTLARDKHLEFSSLRRAQWSTMCMLVELHTQSQDRFVYTCNECKHHVETRWHCTVCEDYDLCITCYNTKNHDHKMEKLGLGLDDESNNQQAAATQSPGDSRRLSIQRCIQSLVHACQCRNANCSLPSCQKMKRVVQHTKGCKRKTNGGCPICKQLIALCCYHAKHCQENKCPVPFCLNIKQKLRQQQLQHRLQQAQMLRRRMASMQRTGVVGQQQGLPSPTPATPTTPTGQQPTTPQTPQPTSQPQPTPPNSMPPYLPRTQAAGPVSQGKAAGQVTPPTPPQTAQPPLPGPPPAAVEMAMQIQRAAETQRQMAHVQIFQRPIQHQMPPMTPMAPMGMNPPPMTRGPSGHLEPGMGPTGMQQQPPWSQGGLPQPQQLQSGMPRPAMMSVAQHGQPLNMAPQPGLGQVGISPLKPGTVSQQALQNLLRTLRSPSSPLQQQQVLSILHANPQLLAAFIKQRAAKYANSNPQPIPGQPGMPQGQPGLQPPTMPGQQGVHSNPAMQNMNPMQAGVQRAGLPQQQPQQQLQPPMGGMSPQAQQMNMNHNTMPSQFRDILRRQQMMQQQQQQGAGPGIGPGMANHNQFQQPQGVGYPPQQQQRMQHHMQQMQQGNMGQIGQLPQALGAEAGASLQAYQQRLLQQQMGSPVQPNPMSPQQHMLPNQAQSPHLQGQQIPNSLSNQVRSPQPVPSPRPQSQPPHSSPSPRMQPQPSPHHVSPQTSSPHPGLVAAQANPMEQGHFASPDQNSMLSQLASNPGMANLHGASATDLGLSTDNSDLNSNLSQSTLDIH

SEQ ID NO: 34 - protein, 617 aa, Homo sapiens
IFKPEELRQALMPTLEALYRQDPESLPFRQPVDPQLLGIPDYFDIVKSPMDLSTIKRKLDTGQYQEPWQYVDDIWLMFNNAWLYNRKTSRVYKYCSKLSEVFEQEIDPVMQSLGYCCGRKLEFSPQTLCCYGKQLCTIPRDATYYSYQNRYHFCEKCFNEIQGESVSLGDDPSQPQTTINKEQFSKRKNDTLDPELFVECTECGRKMHQICVLHHEIIWPAGFVCDGCLKKSARTRKENKFSAKRLPSTRLGTFLENRVNDFLRRQNHPESGEVTVRVVHASDKTVEVKPGMKARFVDSGEMAESFPYRTKALFAFEEIDGVDLCFFGMHVQEYGSDCPPPNQRRVYISYLDSVHFFRPKCLRTAVYHEILIGYLEYVKKLGYTTGHIWACPPSEGDDYIFHCHPPDQKIPKPKRLQEWYKKMLDKAVSERIVHDYKDIFKQATEDRLTSAKELPYFEGDFWPNVLEESIKELEQEEEERKREENTSNESTDVTKGDSKNAKKKNNKKTSKNKSSLSRGNKKKPGMPNVSNDLSQKLYATMEKHKEVFFVIRLIAGPAANSLPPIVDPDPLIPCDLMDGRDAFLTLARDKHLEFSSLRRAQWSTMCMLVELHTQSQD

SEQ ID NO: 35 - protein, 1497 aa, Artificial Sequence
  Synthetic
RADALDDFDLDMLGSDALDDFDLDMLGSDALDDFDLDMLGSDALDDFDLDMVNPKKKRKVGRGMDKKYSIGLAIGTNSVGWAVITDEYKVPSKKFKVLGNTDRHSIKKNLIGALLFDSGETAEATRLKRTARRRYTRRKNRICYLQEIFSNEMAKVDDSFFHRLEESFLVEEDKKHERHPIFGNIVDEVAYHEKYPTIYHLRKKLVDSTDKADLRLIYLALAHMIKFRGHFLIEGDLNPDNSDVDKLFIQLVQTYNQLFEENPINASGVDAKAILSARLSKSRRLENLIAQLPGEKKNGLFGNLIALSLGLTPNFKSNFDLAEDAKLQLSKDTYDDDLDNLLAQIGDQYADLFLAAKNLSDAILLSDILRVNTEITKAPLSASMIKRYDEHHQDLTLLKALVRQQLPEKYKEIFFDQSKNGYAGYIDGGASQEEFYKFIKPILEKMDGTEELLVKLNREDLLRKQRTFDNGSIPHQIHLGELHAILRRQEDFYPFLKDNREKIEKILTFRIPYYVGPLARGNSRFAWMTRKSEETITPWNFEEVVDKGASAQSFIERMTNFDKNLPNEKVLPKHSLLYEYFTVYNELTKVKYVTEGMRKPAFLSGEQKKAIVDLLFKTNRKVTVKQLKEDYFKKIECFDSVEISGVEDRFNASLGTYHDLLKIIKDKDFLDNEENEDILEDIVLTLTLFEDREMIEERLKTYAHLFDDKVMKQLKRRRYTGWGRLSRKLINGIRDKQSGKTILDFLKSDGFANRNFMQLIHDDSLTFKEDIQKAQVSGQGDSLHEHIANLAGSPAIKKGILQTVKVVDELVKVMGRHKPENIVIEMARENQTTQKGQKNSRERMKRIEEGIKELGSQILKEHPVENTQLQNEKLYLYYLQNGRDMYVDQELDINRLSDYDVDAIVPQSFLKDDSIDNKVLTRSDKNRGKSDNVPSEEVVKKMKNYWRQLLNAKLITQRKFDNLTKAERGGLSELDKAGFIKRQLVETRQITKHVAQILDSRMNTKYDENDKLIREVKVITLKSKLVSDFRKDFQFYKVREINNYHHAHDAYLNAVVGTALIKKYPKLESEFVYGDYKVYDVRKMIAKSEQEIGKATAKYFFYSNIMNFFKTEITLANGEIRKRPLIETNGETGEIVWDKGRDFATVRKVLSMPQVNIVKKTEVQTGGFSKESILPKRNSDKLIARKKDWDPKKYGGFDSPTVAYSVLVVAKVEKGKSKKLKSVKELLGITIMERSSFEKNPIDFLEAKGYKEVKKDLIIKLPKYSLFELENGRKRMLASAGELQKGNELALPSKYVNFLYLASHYEKLKGSPEDNEQKQLFVEQHKHYLDEIIEQISEFSKRVILADANLDKVLSAYNKHRDKPIREQAENIIHLFTLTNLGAPAAFKYFDTTIDRKRYTSTKEVLDATLIHQSITGLYETRIDLSQLGGDSRADPKKKRKVASRADALDDFDLDMLGSDALDDFDLDMLGSDALDDFDLDMLGSDALDDFDLDMLI

SEQ ID NO: 36 - DNA, 4491 bp, Artificial Sequence
  Synthetic
cgggctgacgcattggacgattttgatctggatatgctgggaagtgacgccctcgatgattttgaccttgacatgcttggttcggatgcccttgatgactttgacctcgacatgctcggcagtgacgcccttgatgatttcgacctggacatggttaaccccaagaagaagaggaaggtgggccgcggaatggacaagaagtactccattgggctcgccatcggcacaaacagcgtcggctgggccgtcattacggacgagtacaaggtgccgagcaaaaaattcaaagttctgggcaataccgatcgccacagcataaagaagaacctcattggcgccctcctgttcgactccggggaaaccgccgaagccacgcggctcaaaagaacagcacggcgcagatatacccgcagaaagaatcggatctgctacctgcaggagatctttagtaatgagatggctaaggtggatgactctttcttccataggctggaggagtcctttttggtggaggaggataaaaagcacgagcgccacccaatctttggcaatatcgtggacgaggtggcgtaccatgaaaagtacccaaccatatatcatctgaggaagaagcttgtagacagtactgataaggctgacttgcggttgatctatctcgcgctggcgcatatgatcaaatttcggggacacttcctcatcgagggggacctgaacccagacaacagcgatgtcgacaaactctttatccaactggttcagacttacaatcagcttttcgaagagaacccgatcaacgcatccggagttgacgccaaagcaatcctgagcgctaggctgtccaaatcccggcggctcgaaaacctcatcgcacagctccctggggagaagaagaacggcctgtttggtaatcttatcgccctgtcactcgggctgacccccaactttaaatctaacttcgacctggccgaagatgccaagcttcaactgagcaaagacacctacgatgatgatctcgacaatctgctggcccagatcggcgaccagtacgcagacctttttttggcggcaaagaacctgtcagacgccattctgctgagtgatattctgcgagtgaacacggagatcaccaaagctccgctgagcgctagtatgatcaagcgctatgatgagcaccaccaagacttgactttgctgaaggcccttgtcagacagcaactgcctgagaagtacaaggaaattttcttcgatcagtctaaaaatggctacgccggatacattgacggcggagcaagccaggaggaattttacaaatttattaagcccatcttggaaaaaatggacggcaccgaggagctgctggtaaagcttaacagagaagatctgttgcgcaaacagcgcactttcgacaatggaagcatcccccaccagattcacctgggcgaactgcacgctatcctcaggcggcaagaggatttctacccctttttgaaagataacagggaaaagattgagaaaatcctcacatttcggataccctactatgtaggccccctcgcccggggaaattccagattcgcgtggatgactcgcaaatcagaagagaccatcactccctggaacttcgaggaagtcgtggataagggggcctctgcccagtccttcatcgaaaggatgactaactttgataaaaatctgcctaacgaaaaggtgcttcctaaacactctctgctgtacgagtacttcacagtttataacgagctcaccaaggtcaaatacgtcacagaagggatgagaaagccagcattcctgtctggagagcagaagaaagctatcgtggacctcctcttcaagacgaaccggaaagttaccgtgaaacagctcaaagaagactatttcaaaaagattgaatgtttcgactctgttgaaatcagcggagtggaggatcgcttcaacgcatccctgggaacgtatcacgatctcctgaaaatcattaaagacaaggacttcctggacaatgaggagaacgaggacattcttgaggacattgtcctcacccttacgttgtttgaagatagggagatgattgaagaacgcttgaaaacttacgctcatctcttcgacgacaaagtcatgaaacagctcaagaggcgccgatatacaggatgggggcggctgtcaagaaaactgatcaatgggatccgagacaagcagagtggaaagacaatcctggattttcttaagtccgatggatttgccaaccggaacttcatgcagttgatccatgatgactctctcacctttaaggaggacatccagaaagcacaagtttctggccagggggacagtcttcacgagcacatcgctaatcttgcaggtagcccagctatcaaaaagggaatactgcagaccgttaaggtcgtggatgaactcgtcaaagtaatgggaaggcataagcccgagaatatcgttatcgagatggcccgagagaaccaaactacccagaagggacagaagaacagtagggaaaggatgaagaggattgaagagggtataaaagaactggggtcccaaatccttaaggaacacccagttgaaaacacccagcttcagaatgagaagctctacctgtactacctgcagaacggcagggacatgtacgtggatcaggaactggacatcaatcggctctccgactacgacgtggatgccatcgtgccccagtcttttctcaaagatgattctattgataataaagtgttgacaagatccgataaaaatagagggaagagtgataacgtcccctcagaagaagttgtcaagaaaatgaaaaattattggcggcagctgctgaacgccaaactgatcacacaacggaagttcgataatctgactaaggctgaacgaggtggcctgtctgagttggataaagccggcttcatcaaaaggcagcttgttgagacacgccagatcaccaagcacgtggcccaaattctcgattcacgcatgaacaccaagtacgatgaaaatgacaaactgattcgagaggtgaaagttattactctgaagtctaagctggtctcagatttcagaaaggactttcagttttataaggtgagagagatcaacaattaccaccatgcgcatgatgcctacctgaatgcagtggtaggcactgcacttatcaaaaaatatcccaagcttgaatctgaatttgtttacggagactataaagtgtacgatgttaggaaaatgatcgcaaagtctgagcaggaaataggcaaggccaccgctaagtacttcttttacagcaatattatgaattttttcaagaccgagattacactggccaatggagagattcggaagcgaccacttatcgaaacaaacggagaaacaggagaaatcgtgtgggacaagggtagggatttcgcgacagtccggaaggtcctgtccatgccgcaggtgaacatcgttaaaaagaccgaagtacagaccggaggcttctccaaggaaagtatcctcccgaaaaggaacagcgacaagctgatcgcacgcaaaaaagattgggaccccaagaaatacggcggattcgattctcctacagtcgcttacagtgtactggttgtggccaaagtggagaaagggaagtctaaaaaactcaaaagcgtcaaggaactgctgggcatcacaatcatggagcgatcaagcttcgaaaaaaaccccatcgactttctcgaggcgaaaggatataaagaggtcaaaaaagacctcatcattaagcttcccaagtactctctctttgagcttgaaaacggccggaaacgaatgctcgctagtgcgggcgagctgcagaaaggtaacgagctggcactgccctctaaatacgttaatttcttgtatctggccagccactatgaaaagctcaaagggtctcccgaagataatgagcagaagcagctgttcgtggaacaacacaaacactaccttgatgagatcatcgagcaaataagcgaattctccaaaagagtgatcctcgccgacgctaacctcgataaggtgctttctgcttacaataagcacagggataagcccatcagggagcaggcagaaaacattatccacttgtttactctgaccaacttgggcgcgcctgcagccttcaagtacttcgacaccaccatagacagaaagcggtacacctctacaaaggaggtcctggacgccacactgattcatcagtcaattacggggctctatgaaacaagaatcgacctctctcagctcggtggagacagcagggctgaccccaagaagaagaggaaggtggctagccgcgccgacgcgctggacgatttcgatctcgacatgctgggttctgatgccctcgatgactttgacctggatatgttgggaagcgacgcattggatgactttgatctggacatgctcggctccgatgctctggacgatttcgatctcgatatgttaatc

SEQ ID NO: 37 - DNA, 487702 bp, Mus musculus
tgtttagacagcatttaaaatgatgcaaaagaaatttccataaaataaatatacccctggatttagaaccccaaactcaacaacctcagtaaactgaaatggggcgaattggccagaaggttgagatttatgtaagataataataaaaaaaattaaaagtactgttgataagagacctagtgtgcctagaggggtgtgacacacattttcggacaatttgaataaagggcacggtgcgtgcgcgcggtgactattccagcttctggcttccagcacgcacgactggttccgggattctcgcaccgcgcaccgcacggagccggctgctgcgggctgggagggcgcctagggctagcgctgattgaccgggcgcgcggtcaggtgacccgaagcgccacgttctgggagcccggcccgcggtggcttcccaggccggggcaggaccgaacccggagccgagggggactggtctccccgggagaacaaagttgcccggcctggggccccggggcgcgcgagcggcgagacggcgggtccgacctgcgggatccacggctccgaggctgggcgattcgtgctgggagacgcgagcccctacccggggtggcgggcggacccagcagcgccccaccctcgctctccaacaaaggggccggcggcagccggaggaggacctggaggaggagccggagcggcgagcagctctcgcgcacaaagttgtggagtcgcccttcccccgaggaggggagcgggcagcgccgggcgcgggatttctcccgcccagggccgaggaggagccctgggctcctcagccgatcgggccacctcggggagcggcgccccttttctttcgggtcattcctgcagagggaaaactcctgcgtgcgcctgcccccaggctagcgtttggactgttttgtttttggcggaactaccgggcaggaagattgcacaagtcagggggcgtttccaatcgggtgtcaattttggatctcccccccccccacccccctttggatcttgtcgggctttccacgtttcacttaaaaaaaattcttgtaacgtccaaggcaagctccccaccacccgaacacgcccagaggaaccttggggcctctgggacttggctagcaggtaagcccatgcattattgaagcttcggtctgggtaatgtgaccgcagtcccctagggaatggggcgggggttgaaaggaggtgggacctttctgcagttccaccgcccgggtcccgaagtagctgtagccaacttctgcactttccctggaagctcagcgtcccctgcctgggcgggagagagctgggttgagaaggtgggaatctgtactggtcgccaaggtctcagattcctaggtctagtttagtactgttgttttgtctctccctgagaggagaggctgtctgtcgcctgtccgtttaccgccccgagccgggcagcaggactagcgatctccaagaggggacgtggcctcttctgagagcttgtcacacacctccggtcccgggaaggcggggcccgggcggtgtccgggaggagagggtggggagggcggttgtgcggtgggagggttggggagagcttcctagccggcctccaggctgggggcgtgctcgacctctctgtggttgccgttcctgagggtggggccccagtgtggcgaggtggcaagcctgcagctgtggagagacagaggggataggggtacctcattggtgcgcagtcccgcccggccgcctgcttttccggactcttggcatccctcactgcaactgacaaggtaattcatgcccctctttggcctgggtctgaggctctgcttgcccaaggccacttacaaaaccaacaaagggctaattgtaggctgtgcaacttttagaaggcacattgttcaaagagacttttcaagtccctggattccgaccgtgtggcgttccagggttatttcaaggggaggagaaaacgtgtgtgactcttcagagtcagggacccgccttttttaaacccccaaattggagatcctgggtgtaattccgggccccactctctggagtcactgaggtatcatcctttattcttctagccttcagatcacctgggtcaccaggatctggagaggtggcctctccatgcgtttaagtgggagggtctgccgcggccagagcgcacgaattccaagagagatgggatctccagggtggcatggcagcagtctcatcgtcccgttggaacttgccctgggcctgtgaagtcaggctggaccctcgggggctggctgctggtggcgctggagaagcagcctgctgataacgctagtgcctgccagagctggaggaattcgaagctcttgtgggtcgttcagtcccgaggacaaggcagtgaggggcatgggccattcctgctgaagtccccccaccccctcaccagcgtttatgaggctttcgagatagctttaactctcctttgggtgtttactcaaaatttattgcgcctgtaaacagcattaatcacagtggcattaaccttccctggagcgcttcttagtgtgaatggcagttcttggcactcagcggtttcctttacaagcagaagggcaaacttgttcttcggcatccctcttcactatcgccagcattcctagcttttggttacttgtgagtgactaggtttcctccacagccgtctggatgaatattcccttaggatgacaccgtttgaatgttgtgtattcttgaacttttgcctataaagccatcacccctggcgttctgttctggtataactaagaagcgtccaccctgaagggggaactggcgcctgtgctgtggtgcgtgtaggtttcagtaggggaaacactcggtcaacgtcaccagctgtcattttgagggaagagaacggaggacagcaattgcataggagccctatacaacctccgggtcattcacctctagtttctcccttatccgggtgtagagtgtggctacttccattccaccagtgtggatggcggcagaatgtctttgggacacattgttactaagaaagccttggttctagcccaatgtaacttgaacagcctgatagagttgcagtagcattttatttatgttattttgagaaagggtctcactgtgtggcctaggctggccttgaactggcactcctcttgcttcagcctctgaagtagctggggttataggtgtgcaccactacacctggttggcatctgggagtttggaaggaggtatccttaaactctccaactcacatggagctcctgggacattcgtggcaacaagagttggtggctcttaaatgttgttgtttttcttttttctttttattggatattttctctttctttctttctcccttttcttttcttttcttttcttttcttttcttttcttttcttttcttttcttttcttttcctttcctttcctttcctttcctttcctttcctttcctttcctttcttttcttagacagggtttctctgtgtggccctggctgtcctgaactcactcggatattttctttatttacatttcaaatgatttcccctttcacgctgttcaatgttttagtgtgtccctcttcattcttttctagctcattgattttttttttctgatgtttttgcagtgtagtagggatttgtattaggaagaagacacgactggaaaaattatcccaatgtgaaaggcagaatcaaacatcacgatgaaatggcattattggatctatgcaaatgaaacgcaaccctgtgcacaagttaactttacctcaaaatcaaatcggtgacagtgtttgtgtgtgagtgcgtgtgtgtgtgtgtgtgtgtgtgtgtgtgagagagagagagagagagagagagagagagagcatgtgtgcatttttaaaagatggctcagtggttaagagagagtccacgttcactatcttatgtccatttttggcctccttgggcactagacagtcaaggcagacattcacacaaaaatttaaaaaattcatttttcgacatttatttatcgaatgtgtggtgatcaggtttaggggcaggtctctttctaacagagtggaaacatttttggaagcctaactggaggtccctgcataaagccccttgggaagtggcactggacttgtctttcaaaggaacttcattccaggaaagagactttttcttagacagccgggatttcctgtaattaaatgtttacatattctgtggacaagattttggttctctaatatattaaggatacacataaaagtttagaaaatctttcacactctgtacctcaagataggaatatatttgcttttgattatattctttgtagggagctgttccgtgaccccctagtctcatgtagctcaggccgccctcaaactctctgtgtagcagaaggtggcgttaaactctgtcttctccaactggggttacttgttcactcctggcgaaagctgcttggcaaatggccaggctgccagtcctcttcgctggttacttttgactttcattttgtttttgtagttctggggatcgaactcaggaccatgcatgcacaccctgcaggctaccattaaggctcatcctcagcccttttagtttatttttaatttttagacaggtagcctagactagtttgggatttactctgtagctcaggctagcctaggatattgaggaccctttttcctctgtctcttaaatgctggggttacagctgtgagtcactatacccaggtctgtaaatccttaataaccataaagtcagaataaacatttaagaatttttttaatgtcctttaaagtctgggagactgatgaagcaatccatatatggagaggaaatggttcttaaagctttaacagtttcccagtgttccttcgcttctactgcattcactctcattttgctcttattaatggactctactcatttcctgacttgcagaaagaaaagttattatgttgcataatgttaatatttatataataaagtactgtttgctacggtgaatgactattgaataatggaacacacaactattacacaaataagaaatttaaaataacaatatagtacaattcattcttcgaagtaaggattcatgctggagagatggctccttggctcagagcacttcttactttcccagaggctccaggttcagttcctagcacccactgtgggcgactcaagactactggtaactccacttttagggaatggaacactcttttctggctttcgaaggtatcaggaattaacagagacaaaaatgcaggcactcacatgtacacataaaaatattttaaaatcgtaaagaagaaccactaaagaattggtggtccattactacctagaaagaaaccctagttctgacatttgcttctctctctctctcttttttttttgaggtggtgggggtctgacttggcagctcaagccgacctagaactcagtgatctgtcatctcagggatgacagacacaaaccaccttgcctggctctgacgcgtgttttaatgtgtgaattagtgtactttctctgcagattactgttgggatgtcttgactctgatattcctaagtagtgattaagttcattgacattggggcgctcttaaagggggccgtggtctggaagagacagagagactgagctgagagactgagcttggctcctctctgggcagtgtaatccaggaagctcgggagcagagaggagcagtgtttgctggcgttcttaatgaacgggtgctcctgcagggcagatcttcagatctttaggccctggagatatttctcacagttactgaagattggattgttttatctgagtggtacctacccatgtacagcagaattggtgtcatgacccttccagaatgaagtttttatcagtgggcaacatggctatctacatttctacatacatctacaagccgtaccacccctgaggtccagatccgtatttcccgaatgctccctttctctttctgtgtctcagaagcaccttacactgagaaaatccaaaccgcatccattcttctctgtaatgtcctcagcggttcccaaccgagtagtagttcgtctacttctgagctgccctgtgccagctgagtcactcagcatgctagtatcctgcgtctctaatgccagggctgtccctgagtcttattgaccttttatttaatatcctgtgtatctatttattttttttccatctaatccattgaggccacaatcacatattgcttatattaacagcgttataacagagagattagcacaacagatacagagctgctcgtattttctttataacatttacttcctctgcctgtgtgtatctttgcatgtatgcttgtgcgtatcgatttgtatatatataaatgcatagacgtcgaagatcctgtcatacttctcactaatgacttcatagtgtctcctacaatggaagatatcctcctccctaacatcgctgctaactaatcctgcagtgtaacattggtataataatattgcctaaagtaaaccctaaaatgttttctttgaaaattcaacccaggatagtatttggtggtcaggtctcttttgttttgtttaatccatgaagaaactacctttctttgggtggtttttgtttgagtgacactgggcctgtgggatgtgtgtgttgtttgtgtgtattatagtttggaggccagagattggcatagtgccttatttttgagacaggatctctcattgaacctggggctcgctggttggctatgatcctttgtttccagaggaagtagttggaaacaggcattgctggcacatgcccatgcttgcttccctcttttatttttataaaattcgagggattgaagtcaggttcccatgattgtgcagtaggctctttacccacagacccatctcctaattccctaggccttttgttttgatagcctcttccaatttgtgtgcccatgataagcctcatgattgattctccgacagacagagatactcaacagagggtgcgctgtgattccatttatcacctgaggccccattgatgcttttgtaaagtctggtcaagcgtgggattatttttctctaacgcagtagcatgaaacaatttcagatgcagagaagagctgaaatgtttccattcgacatctcctttctcacggcctaagttctttaatgagagcactgctctaatgtactgtagtccttggtgcttcctgagttactctggtctactgacaagccatggtgtgaacgggcttatgtcacctctctgattgtccttctcctcagacaggtatccaagcctctctaggaatctctggccccagctttcttcctcggctgtgtgacgtgcttcccaaaagcaggacttagccccctgcctcccagttctcagcggcgctaatatttcacataccaagctcttctcttttctacttgccctgtagctagtgaacttcttcctctccttgaaggatagacccaaatgtcattgcttaggaaggccttctcagtggccctgggcaggtgtgactcgtccactttatgactttatgactttatctttctcttccggactgctgtcagtcatcagggttgtaatgaggtcattgattatagagtgaatttcattttatccgtgaagctcggtgtccataagcctcactcacgtggaagaggctgtgctaaataaagcctcatgtggatgtgctcaggaagccactccgtaactgtgtcttagactatatgtggctggagatggcttagcagttaagtacttgacaccccacctcagtatccgtgcagatgcccggcacatttggcagcctgtttgtaatcccagcacgtgggatgtgagttcaggggaaccctggggttcaaacagagaccctgctttaacataaaaggtagagagcagcagttgaggcagacacccaagtgtcagcctctgacctccacgtgcacatgcacacatgtacatgcacacccacccctttcacatgtgcacacacagacctgtgccagaagcaaaggaaaaaacaaataaggaatatgtttctgtatttctactcaatactttctcttttcctgttaggtattcatgctagcctggaccatttttcagatttagccttcagaagaggatctgggaaagcctttggattatactgaaactcattcaagatggccaagtatggggaccttgaagccaggcctgatgatgggcagaacgaattcagtgacatcattaagtccagatctggtgagtaatggatgcatcactgtggagccctctgtatagactgtgttgaagacagagatttcttagcttgttgtgcattgttcttgttaagtaaacttctgagaaactgaattctgagccgtgagtgactattgctctgtgaaaggcaatctccagtctctgtgtggcctatcttacactcccagcttgcctttgttacattgtgtgtgcagtagttttactgggagaaactcctgcctacagcataactgatgctgcgcagttatgatgtcaataagatagacaagcttagtctaacatttacccttattacctgaaaacggaaaggaatcacatgcttagagtagcgaataccatagtttctggtggaaagatcattttgtggtgggattccttaaccttttgcccacctgctaattgctgttggatgctaacactggcatgtgaccttctctttccttttagaaatgttagtttctaaagatacagtcttccccagtgtgatcaaatcagccagactaagaccgacgaatgactttcatgtgaacattcggattggaggtctttggatgccaccccacccccagcttattatataaccactgcttttcaattctggctctccaaatgaatcaactgggagtttttttacaaatgcagatgtgttggctctgctccaaacccactgaatgaaaatttctgtatttttaaaagagcttcaaacatggttccgagacaggctcaaaggggagatatttttgagcaagcatggcctttttaagctgggaaaattatatagagttctcacctgggtgtgagcattgtccttttgtaactccagcattataaacattccttcgtgtcactcttcaacaacaacaacaacaacaacaacattgaatagaactcaaaggtgatatttcctgttggaaatgtctgtgtgttatggtaagagttcatttcttagtcgaaactgctaaaatacgtgcaggaaatgagatctcagtaggatatgcattgcccttcgtgatgctggttgtgcttggtctgtgaaacgtctggatgttacagataaggctgtgactatgcagtggtttttgtagctttaaggactctttgggaagtgcgtcggcatgttgtgtggtgtattcactgtgatctcctaaatgtcattttaggggtacagaattcatatgtagagatgtggaaagtgacaggaaagtggaagagagacagctagatgtctctgtacgtctcagagtctataacttgtgaggccaggtgatccttcgcatcgtcccgaatcaacctttattacagaagaccttggattctggggtaggaaggtggctgcgtgggtaaatgctgtcgaagcctagtgatccgcgctcagctctcgggaccccagtaaagaaagggagaggagagaaccctttccacagaaactgtcctcttactccatacgtgcacattggcatgtgcgcagacacacatatacatcaatagtaaataaaatacactaaaaaaaagactttagatatttgtcactggttctctgtctttgtccactagaaaatagttttatggaaaaatttaacttttagagtatattctgagtatccacacttccaaactatttcttaaatttaaaatggctatttataaagttagtaaggtccatacatggctgggggtaatttgttacagtgtatactttttggtgttaagatagtttgtttataaaatattgtggtggtttgaatagctatggtccccatagactcaatgtttgagtgcgtgacccatagggagtagcactattagaaaatgtgtcactgttaggacgggctttgagctcttttgtgctcaagcgacacccagtgtggcacacggtcttcttctgctgcctgtgcatcaagatggctcctccagcaccatgttggtctgcctgcatgctgctgtgcttcctgccatgatgataatggactgagcctctgaacctgtaaggcagccccagttaaatgcttccctttatgagagttgccatggtcattgtatctctttacagcaatagaaccctaaggaagacaagtgttatttcatttactttctcattggtgtgtacatgggggtttggatgctcatgccacagcacgccagtgggggtcagaggacaaatgtcagctttctgtgatgtgccacgtgcatccaggagaccaaacttgggtttcttgctgagccattttgccaaccttccgtgctgctttttttaaatagggaacatcaactgttcgaatgactctgcttatagagtttcttcctaggcagaggatataaatgtacatttaagaagttgactgtagcactgtttacaatagaaaaaaagagagagagagaaagcaccataaaaatccaatttggacatgagttaggtcattgttgcctagagtgtttagaaatgaccgccagttcttaggttgttactattttatttaaagtctgtgttcttagtcaaataactctagaaatagctaggaacttactgtctccttactggggtcgcacagctgtgtggatgacgcagcatcccagtggaggtaattaagatagagcgcatgactgaagcagcgacgtgttcataagaagtgatgatattgaggtgtgtggatgtgagtgtatataaacattacaaacatggagggtgctatgaggtattgttaagtgattatgatacaggaggctgttgatgtgaaaagtaccctttaaaagcttgccggtgggagccggaagatgagtcagtggttaagagcacttgttgcttttctaggtgacctgggttcattcccacagcctatatggtggctcacaaccctctgtaactcctagggtagctaatgctctcttctgatctctgaggacagcaggcactcacacagtgtgcatgcatacacgcaggcaaaacactcgtacacataaaataacaacgtaaacacacacctgctctcctatcaggtgggaggctggaacagggagattttgagtttgatgccaacctgggctatgagatcctgcctccaaaaagatgtgagctatatcccagaatcttggcatttgggatcgttctttttcttactgtccggccacacgtgttttccaaagccgcttgatggacttgtattacttaacttcttacgttttaaaaaattctcaaattgcttttagcatttttactgtcagtgttataactgtgccctccctttgaatggcacctacttcaaaacacgacgaaaatttagctcctgcatagctgagctatgaatcacattcctctggctggattgtgttgcaaaagctggcagatcaatttggatttgaatgagtctgtgagtcatctctttgatttctggaagccatactcttgatttttgtttgtggcaaatgcttagtacacagggtaggatctcgggacactccaaagtttacacattattaagagacttttagaagtctagattaaatagttggaatgatccatatccaataaataaatttgaaagatttttactggttatgttattccatgctgcatattagttttccactttttaagaaggaatattcaccctgtacctgttgcttgtttataatcccagcatttgggaggtggagatagaatcgagagtaaaaggccaataaaaaaaaaaggtcataacatcataaacagagagtagagaactcaagtgtggtgctgcatgcctgcagccacactatttgggacccagcctgggcaatttagggagatcccatctcagcgaaacacccctacctcctataaaggaatatttttctttctattggagattaaaagactggaataaaattgagaatcttatacatgcatataatgtgttttgatcaagttgatctccaattacctccctttctattcttcacgtctctcttctagtcctgttcaatttcatatactctttaaaagttatctatctatttctatctatctatctatctatctatctatctatctatctatctacctatctatctatcatctatctatctattcatttttgaaacagagtgtggtggctacttttgagtcaatttgacagaggctggagtcatctgaaaggagggaacttcagttaagaaattggctccataagacaggtccagctagagggcgttttcttcatcaatgattgatgtgggagaggccagcccattgtggacggaccatcatttgtgggctggtggtcctggattcttataagaaagcagcctgtgctagccaattagcagcatccctccctggtctgagtcaccgcctcctgcctggttcttgtcctatttaggttatgaccttgacttcctttgatgatggactataatgtggaagtctaaaccaaataaactctttcctccccaacttgattttggtcacggggtttcatcgcagtaatagtaacccaaacaaagacataaggtctcattatgtaactgtggctcgtctggaattcactatgtagaccaagctagctttaaactcacagagatccacctgcctctgcctcctgagctctggtgttaaagacatgtgccaccatatctagactttacattttaaagtaggtctttggtaatttcatacaatatattatggtcatattctcccccttcttaaacatctctcagatctactcttccttccctactcacacaaatttgcttccttttttttttttccccctgaatccagtttgtatttccatatactcttgagtggctatccactgggtggcctggttgaccttccaggggttggtttgaaggacagcggctcccatgggctctgtgtttgaatacagggtccctcactgatggacctgcttgggaaaaaccaggaacttttgcccttgttggaggagttggaccactgtgggtgaactttagggttttgaaagtctcagcccaataccagtattcctctctctgtttcctgcttttggatcaagatatgagctcttagctcacaaaaccaaccaaccatccaactaaccaaccacttattgccctcgttccatcttaagttgtgcatcagattcgtaattcagtgtttaaaagccattttgccatctgaagagaaatacctagcaccagttacttgcatgtcgcccccaggattcggatgagggatgaaaacgacagaaaagcgggggtcttgtgggatgcgctgactgatgtagcttagcgtgcttattatatacagtttaacagggaggtgggcttattacatacacctggaaatagaggcctgtttccctaagcttgctaggagcagtctctataagagagcagcctctaagactgtaaacattggaggaataggggagttatggaagacattttctgcaaacactgtcaagatccacaatctaatttgaggaatgcctagccatccctttgagtctcacccagggagggcgtggccacttccaggaggctgaggcatggctgtgctcacatcaacaacacactcactctgggcttcactcctgccctacaactaagtgatcaaaggtaggcactgggatagtttaaagaacaaaagccacacactttgtgattgccttagatgtgaagcctgtgggtcactttgtagagttatggcctagcattcatgaggctctgggttcaatccccaccaatacataagcacgttgtggtggtccacaccagcaatcccagtgctcagaatgtggaggcaggaggaccagaagttcagggtatcctcagcttgtcatgacacactgacaccctgtcactctaagataccctgcctcaaaaaccggcaaaccaaccgggccaccccacccccacccaataaaaaacaaaatagaaaaaagaagagtctagaaagcatttgttgtctactgggctagggtttagggctgctgacagtgagccttcactgtctgctaaagcacttgagataaggttgtgagaagtggctagaatagtgacagctcttaatctgtgtcagtcggaaagcctaacaggtttataaagattttaaaatggtagtccaagaataatcttcagaagccgggtgtggtggcacacgcctttaatcccagcactcaggaggcagaggcaggcggatttctgagttcgaggccagcctggtctacagagtgagttccaggacagccaggactacacagagaaaccctgtgtcgaaaaaacaaaaacaaacaaacaaaaaaagagagtaatcttcagagaaaatgtgctactggtggagtgtgtggtttattaacttttctttgggacatgatgaaatgtcaaagaacaggctgggcatacacacacacacacacacacacacacacacacacacacccctttttgcctcccacgtgctgggactaaaggcttgcttcactgtggctggctacctccttggttttttatctaactctgcgttctaattgttgaggaaattagagcccatgcaaagctgagcctctaatgctagcatcttagcggtgatgctgatgctgattcctgcatcacagctgcacgttcacaggtggcaatcaaaagccatagaggagtcatttgttacactagccttttctctgtttccgtaggaccttcccaggtgcacctggttccctgccatttaggttaatatttaaatgcagccttcattgagtggccttctctgttgactttggaagtcatgttttttgtttgtttgtttgtttgtttttgacctacactttttctttattcttctcttttttttcttttctttctgtatttatttgagaaaagggcttgctttatatcctagtctggcctcaaactcatgatgctcctgcctcagcctcccaagtgccggagttacaggtgtacacaccacaccctgcttagtcaccctgtgccctatcactgcttgtgacttctctgtgttttctttctcgctatctggtactttgcttgcattttgtacttgctgatatcctttttcaatgcagctcgactccatgtgacttggggaaccagtacacctctggcatcaagcccagggcacagtggattgtagccaagtgataagtacttacccaatggaaaaggttccatggcttggagattcacgcgctgggatttgaattcaggatcaggttagacgggggaaacctggagtctgaactctgcacagtcttcatcctgtgcctgccaggagggtcattattttatgctcagatctgttccttgcgaatttgcccggtgttaactgtgcacaggtcctctcttgctccctccttgctacctactgagggtgaccctgggctgaagtctggggctgctttggttccctagtggtatcgtagcccacataagagacaggacctgctgctgcttggctgccttcttttctatctctgtcctgtcattctcttccgggagctgacaaaggggataacattggaggacagacagtccttggggcggaagatgagagactgacactgtctctgacgtggattctctttctctcttcctctgatggctgttcaaggcttttaactggatggcaaagaaggtaggatttcagatgcactgacatttggcacagggtaggccctgatctggtgcccagggaggtaactgtgctatcgagatgtgttgggggagggcagaggagcccatgaaactaaaggaaagcaaatttctttgctgatggtttacgctgtgttccattatagccagcttactgaaaacatgccctgtgatatctggtgtaaattagagctgcccaacaaggtctggagtgagagaaaggttgaggaggttggctttctctgttgacctttcagaaggtcctcttcagacaacacagtggctaagttgcgtttagggagtgagtggtctggtttttaaaaggtttacactgatcgtagtatccaagagagatttttctccacagtttaagggactatgaaaacagttccttgctccttctggagattcccttagctgaaatatctgtcctttgaagggaagcctttcagcgggcttggtttttttccacaagcccttgggacttgccttgagggacagacagggacccgggtggaaactcaagtctgttagagaacagcagtcttgggacgagcaaaagccttgcctgtgtcacaggtcctcacgaggctgaggaggagcgatctaagatcttgtctgtgccaatattctagcagaggcggtgtgttcattatatagacaggactgaaaactcaatttgattgaaccttatttgaacccagaagtttgcactggatgctgatatcatgattttccctgggaacaagggaacaagggagatcatgcaggcagttgtaaacactagttaaagtttaatctaaagcagtggagaataggatgcaggtagctagagtcccgccctctttcactgtgtggagaaacaagcatttactatggtgttgttttgatatgcacttttaaaaattaaaactgctgaatgagagctatgctcaactcaatatttggaatgcgagccagcgtgagattgtctgcacgtatgtgtatgtgtgcgtgggtgcatagagaccaagggatggcctcaggtgctgtttcttagcagctgcgaaccgtttttgtttaagcctctcgcactgagtggctcctggtagtctgcctgcacactgagccccagaggtcctcctttctccatctccctagttctggaattataagcataccaaatgctgccaccataccaagcgcttacaaggcaagcgccttacccagtgagctacaggatgatagagatttactctcgagatgatagcctggggaccagacccagccttggatcccaggcttccttcccatttgccattgcttcctcccctctcagggtgcaggtgacacttagggacttaggaagtcctcagacttctcagctaagctgtgtgtcccacgcacggggctgcttttgctgaggctggctttcatggcacgatgactcacaagtgacttgttggtctcttttgcatgtgtggcagctgagattccgacttggtgtggcacagccaccaactagttttgggaactcaatttttgttatattattgtttaaaaatgattttcttaacatttattttagtgtgtgtatatgtgcctatgtagaggtcagaggtcaggttatgggagttggttttctcctctcgatgtatgtgggttctacaaatagattttggtgactatatgtgtgtgtatgtgtgtgtttcagttctgtcaaagtggtggagctcagttacacagcaaacacacaaatagcgtgtgctatttcacacgctaggaatcttatgtgtccagtacaatccttgtggcccttacttctgtcacaaaactttttttctgtccaaacagtaagactctgggcggggtggtggtagtgaacccctttaatcccagcacttggggagcagaggcaggaggatttctgagttcgaggccagcctggtctacaaagtgagttccaggacagccaggactacacaaagaaaccctgtcttgaaaaaaaaaaaaaaaaaaaaagactccgggctgggtgtggcagtgcgtgcctttcattcaggaggctgaggctagtggagttcctctgtaagtttgagaccagcctagtctacacagtgagtttcaggtcagccaggagcacacagtaagactctaccttaaaaacaaaccaaaaccaaaaccaaaacaacaccccccccctcccccaaactaaaaaccaaaaaacccaaaccaaaccaaaacagcaacaaaatcacatcccctcccctccaccagccaaccaacccaaaccaaccaacccaaaccaagagaatgcaggaccttctcagcagagaaatctatttcagtataggacttggtacttggcatctgacgtgataaagcctgggacgttggccttgcttcccgccctttcagaaataccaatatgcctgcatattagaaaggtttggttgccttcctatgatttttggctctacagtatttatgtggaggagatatattttgagactgatataccccgtcaagggcacccgtgaattgcattatttaaagtaaattctgtaatcacatagatcgatgtgtgttctcttattgggaacactgggctttgagcttcaggctgtgtcagagtcgccctcctggattctgactcaggaatttccatgagccctgagagtttttccttcctagtgccttggcttagatagtgaaagtcaggcctgtgggtctcagccttagagagcagcctgagttcccccgaagggaggaaagggagagtcaagtgttgtttatttttactcagaaacatttcctggtaaatagatttaaaaggtaatggctttcatactattggcctttgatggtttggtgtctcatagtttggagcttgggtttggctgagaggaggtgaaactcaggaaagtgggtcaggggagggctgacagatgctgcttcagttctggggcatctgaactggaatgtccctcccaaatactgactagggctgtctctgtccgctctgtactatagtcacacctcagcgtggttagccctttcctgaggctaaccttggttaactttcctgcccacagctcctgagcaaggactgctctgattgcttctttgtgaaagctttcttcttttcttttcttttggtttgtctgtttgtttgttcttctgtttttagagagggtttcactgtttatttctgaccatcctggaatttgctctgtagactgggctggcctcagactcactgagatcatcctgtcttggccttccgagggctgggatttgtgttgtgtacttggatggctgcttggctggttctctccaccccgactccacctccatcgccctttttgagacagggtctcatgtagcctcagatgcccaaagttctgagacgacagatgtatgccaacatgcctggtttatggagaactggggatttctaccaactgaggcccctccccagccccttaatatgactatatagtttctaagacattacttcctaaaagggtgtatttgtcactggtaatgggaaaagaaaaaaaaaaaatctgtgctactttcctgattttctttatgctcacagaaaagttgtaagtatatttgcctctctgctttttaaagtctaagtacgtgatgtttggtgtttctgctccctttgagatgaagcagtctctctcttttctttctctctttctttcttttttaaaatttatttacttattatatacaagtacactgtagctgtcttcagacacaccagaagagggcatcagatctcattacagatggatgtgagccaccatgtggttgctgggatttgaactcaggacctctggaagagcagtcagtgcttttagccactgagccatctctccagccccctctcattctttcaaaaccagtgaattttaggaaagggtgatttgtgtgtcaaagggttaaaaagttataaagggactggagagacggcccagtggttaagagcattgcctgcccttctagaggacttgggtttgattcctagcaccatgtggtagctcacaatcacctgtaactctagacccaggggatgcgataccctctcttggcctttgtgggcatggcttgaacatggttcacagatattcacacaggcagaaggataaaaaaggatacagacaggataaaaaaggataaagggaaggagggggagttaagtgggtcgtgaccatggtagcatgttccttagggatctacaagaacatcctggagggcttgtaatatctttatgtttcaagaaccaaaactgaatgaaaccaaaccaaatcccaaatctttcatagacctctgcaggaataccactgagttaaacatctctgaaagtgtaggaagggatgtcggttcattcctagagaaggcaaccctcaaggttgaagatagtaatttttgtgtttgtttctgtgtatggaatttgagcaccccccccccaagtttagtgggagccatttcctgggcagtttcagatggatacgtggaagggcattgtgggttgggcctgagtagcttgctgtctatctgtgacggggacacagaattttgtgcagacattggctacaatgaagagtggggcaagtcttaacaacccatttaggaaaaaccatatttagattgacttaaaagaaagagaccacaaaatagaaccaataaaatctatcctaaacagactatcccaaacagcaaaaaaggtttccaagtgatacaggatccagttgtcagtgaattgttgtcgtgtcttgtgtgaaatgataatgctttttgaaatttacaatgtaaatattgactcagaaatgagaggatgttcctgaatttaattagtgtggaagattccaggccatttcccccaaagcctagcttgcagtgagctctgagttaagctctggatgtgttctggtctttgtatctccatgttgtctctgcaaagggttagaggatgccttactgtagagtgtagacatagaaaggcgtcatgcaacgcagaccaagcgttctttgtaaagacagcaaggaaagaacactaacctcactttgaagcggggataatcatctccgacaagtaaaatctgcaggcaagagagcccagaaaacggtttgagctcaactttaattgaagactgggggtgtttagcctgatgctgtgcagatgatgtcatcctgtgttaccgaattcagcttcagcagagacgatggagtaaatgcaaattaaaaataaatcgagagcagatgttgaagaatacctttcatttagggaataattaagcagtggaaaggtcattggagtttagtcaataaagctgagatgtgctgaagtcataattattcagctaacagatgcctgcttttggttgtgctctgctggggagcatttgggattggtgactggaggaagctgttcctatcttgttggatggaaagttccatcttccaaagttgcccatccagtggactaacttgaatgtacactgcatgagccaccaccacagtaactttgaagcagactggaggagcccctttcaaagctctcgtaatgattaggcctgtgtgctgctgatacctgtgtttttggtttggcaaaatacattgtgttttgtcattgcaatcttgctaggtttcagtccctgaaaagggtggcaacttagaagaaagccttagggctttagagggttatagtctgtgccggtcttgctggggagtgtggcagtgggcaggcacagtactgcagcaatagctgagagcttacttttttttgttgtttttgattttttttcctacaaataattgggaatgacttgggcttttgaaattttaaagccctcccccactgacatgtctccttcaacagggccacacctcctaatccttcccaaatagttccactaactggagactaagcatgcaattacatgagcctatgggagtcattcagaccaccacaggactcttgatggttttctctagtaaattatagagcatatagtgatagcattgagggagctagagagtggtagtttgccagttaagaacatagtactgcttttacagaggatccaagttcaattcccagcacacacaaggggtgcctcataactgtaactccaggtctatgtaggagatctgatgtccttctggcctctgagagcttgatgtgtacaaagtgaggctcacacgatatgggcactaattaaagggcactattaaaacttttatcgatgttttgaatattttattcctttcgtattttctgaggttttaggttggctgtggagtgagcattagagaggtaatatgaaagatggaagatgccaggcggtggtggtgcacgcctttaatcccagcacttgggaggcagaggcaggtggatttcagagttcgaggccagcctggactacaaagtgagttccaggacagccagggctacacagagaaaccctatctcgaaaaacaaaaaacaaacaacaacaacaacaacaacaagaaagatggaagacaccggaaggtgggacagtgagtggtttgggaggcttaatatttgggtaggtcattgatctaggtcataggacactgtttcacaggtaaaatgtagttactctcaggttaggaagtaactcacttagtgtgagggcttgagtttagctccctagtcggtccctgacactgtagggacagtaacacatgtatttgcgaccccagtgctgggggtgtggtggggcattctcaatggccagccagcagcctaccccaaatttgtgaactatgggaggaataaaagccatgtctagaactatttgtttgagaatgacagaggcagacacttgatattgaccacagctttctgtctctgtctcctcctgcctcccctaccccatacatagagggatagcctgtgacacccaagagcagatctgaggctgctagatgctccaggcagggtggtgcactgtctggttttctgtgtcaacttgagttagcacagagaaaggggcttcagttgggggaaatgtctccatgagatccagctgtaaggcattttctcaattagtgatcaaggtgggaggtccccttgtgagtggttgccatccctgggctggtagtcttgggttctataagagatcaagctgagcaagccaggggaagcaagccagtgagtaacatccctccatggcctctgcatcagcttctgcttcctgacctgctcgaattccagttcctgacatcctttggtgatgaacagcaatgtggaaagtgtaagctgaataaaccctttcctccccaacttgctttttgatcatgatgtttgtgcaggaatagaaactctgacgaagacacagggggctggaggtggctcacaaaggtttgtcttccagggaagtgatggctctgccacctagtttctctgccagggtgccgcggtctttgactgcctcctcgtagcagttagcttgtaattcatgcttgattcctgttaccttcttcttcttgatggcatccttggagctggcacagatcattttggtcttaatgggtgcactctcaggggcccagaagatgaccaccaggtctcataggttgcatcatagagcgcgtagcggcagcatctcgacaaaagtggtgtaggggtcgtccacagtctgccctgcatctcgtaccttgccctcccccgggatgatgttcttcttgtcctcactcaggaaaaagagcactgccttcctgtgtttcttcacttcttctggcttggaggacttgtgaactttcatgtcattgaacaccttgatcagagacagccacgccagaggccatgtttccagaaacgaagacagaaagggctactgaagaactgagccgccacagcagctgctgggatctgactgaaccaatatatagttttgttttgtttttttaaaaaatactttggcttatgcgcattttattggaaaaatttcccagttctgatacatgttctttttgtaaaatatagttttaccatatatatatgtgtatttatttattttctctgtctctgtctctctctgtgtacaaacacatgtgcctcattctcacatgtggaggtcagagggcaacttttgtgtattgattctctcctacttgtggatctggggatcacactcaggttgtcgcgcttgctgtcgtggacccgtagtcactgggcctcctctctgggctatgattatgttcttccaggagatctatgctctaagagttaagttttagagaggaaggcatgatgtgtaactagggttctgtgttcacggtactaatatcattcctgatggagattccgatggtagtacgcagctgggagttctgtggctcacatcgttgctgtcactccaagtcccccttactttggcccttgttttcctagaaccagtcagtcactagattgctcagatgacacaaggtgagaagacacaaagtgtgaaggacagaatttgtgatcttgtttgacccagttttgcatataatgaatttttatttgttgacaaatctttcccttttgctaaaagtggcaaataatcagacataaattactaattaacagcctggttgaggttttagttatttatgttttaattagtgaaacttgtgctgcatcaggctctggtagggttggtatcaaaatcttttttcttttttttttcctgatgtgaagaaaatgtcttcataaccctgttttcaatagccaggcatggaatgacgactgagtcagtgtattggaaggatattagtgggttgccaacattgccctttagccagtcatacttttttttttttttcaagagaaaggatctccctgtgtagccttggctgtcctggaactcgaaggttggctttgaacttatagatatctgctacctctgcctcccaagtactgggattaaaggcatgtgccaccctctaccttcatcccccacatgatgcgtgcttttaatatcagcacttgggaggtagtggcaggtggatctctgtgatttggaggccagcctgtccttatgtagtgagttctacaccagccagtgagacactgttttaaaaggacaaacatataaaggcctagttagtaaaatgatgccagtttttcttctagatgcatctttgaccattggttcagaatgataggggtttagtttcacgctcccacatgtagacttctagttctcccagagccaattcttaagatgctatcttttcaccaccacatgtttctgagagctttgtaaatcatgaggtgactatggctgttgggtttggttttgggccttctgttctgctctgatggtatatgtgtctgtctttatgactacatggcactgcagtgtaatctgagaccaagcattgtcatacagccagcacagtactttagcattactttggctatttggggtcttttgtgcatttatgcaagtttctgattgcttcttctggttatgtagagaatattactcaaactttgatagggattacattgtatctggagattggtttcactaatacagccatttttgcagcattaattctgctaattaattcatgagcatcttgccttatcttttggtgtgttcactttgttgcagccagaggacaacctctgttgttcttaaggtgctatttacctatgtttttggagagaaagcctctcggcggccaggatatcacctagtaggctacctggtcagtgtgccttggagatctctgccagtctgcctggtgttgttagtctcctggtatcatgagtatgtacctagtaatgcctggctttcctctcttccttctcctcttcttctctccttccttcctttctccctccctccctcccttgatctccatcttttggtgataaaactaagggtcttaagtgtataagcaaatattttattgacagagtcattaattttgcattcttagatagttttaaaaattgcttttcaaacactgctagccatttatgaatgtatgtatgtatgtatgtatgtatgtgtaagtttgttactgggatagccaaagctactgagtatgttggtatgctctgctactttactggctgtgtttattagttctaggagttctctggtggagtcttcaagtatcctaaatatgaagaacagtgggggacattatgatggaaaagagaaaggagcaagatatttgaaacaataactaaaagtaaaaaagaaggaagaaagtttcccagtaatgaaaaggttcaaatataaaattgtttgggtgtaagaataagaaataaaaaagcccaatatggtcaagttgcaatactgctgcaggtggggcacagaggaatataaaaaagggaagaaacgggacaaaacattggaaaaagaagagaggtaaatcatgtgtggggtggcgttgctgtggccagctgagcctgtgactgttgctcttggtttctgctgatgctgagtgtgtggtggccaagggtttgctggtggctggtgcttccttcagctccgtagctttcttttgtaggaacccatgcctttgtgctgagtgggtccttttactctcccccacgaccccagattgtactcactgggtggctggacttctagccaagagttgtctccagatttttgcaagtgtgcagagaagcaactgccatgggtctatgtctacatgtagaggacctaactttgtcttttttttttttttttctgtgcatttagatttttcaaggaatcatttattgtatattatcagtgattacatttcacagcaaaattaaattaaacacacactttggacaaacatgaaatggaagtcaaatctgtcatccaaatgccgagctgagtcttccttctgtttttttaggctgcagtagtggatcatgattccagattaatgcaacggattattccttacatgtgacagttgtttccacaacaggccctcgtgtgggctcctctcgttcctgttgagctctttccttttgctctgctctgtcgcccgatgtcatctattcccacgtaaaaggaaactctgagcccagtcctccagtatcaggcaccaattgtatataccacagacattcactggtatgaactgaggctcggtcatgacacagggtgaaagttcctgtcctcagacaccccatgacttcatactctgaagacttcctgtgagtaaaaatctccctgctgaagagatggctcctgttgctggagtgtagcagtcactgcagttttggggttcctgggctcttcagcagtgtgtggaagttagtaagctctagagactacccaccttgtgacctcaggctcagagctatcagacttcagagttagtctcagttgatgagatgtgctcctgtctatcaagggtgggagccctctcttcctagccacttccctacatgggccagccttctgccagccgcaccctacagcccagcagaattgggctctcctgttctctgccaccacatccccagaccattcctcactctgcagatatgggataccaacttgaaactccctcacctgaaattgctccgtgttctcaggtctccagggtagctcagctgttaataacaggttctctctggagatggtgccagctgtgacgcttcggggcagtcaaagtaacaaaatgggatttattaccattacttgtcctggaaggatcaccgtcaccaagacccacccccccccagcctcccacctcccccccccccgcccccagttggatttgagtcttgtgagggctgagggcttgcttgtcctaggggtgggacagcttgtccagccccccccccccatgtggtttctgctcccctttccactgctaggaagcagctttgctgagggcgtgttcagctctttctagtgtattctgctgtcctttcctttacttcctttgtgaatttctgcagcttcccttcctctgtttttggaatagtccctttagctctgcctttctcctttactcctagccatcgtgtgacctgctgtgacttccaggatctcttgaccctgtgaactctggagaatgtgacggtggcagccacacactcttcctttttgggcaggaagcagagtgaagtgcagctaaatgtgtgtcttttgtgtgtgcagtgcatgtatgcgagtgtgtgtgtgtgtgtgtgtgtgtgtgcgcattggtgcttgctgaggctggacgatgatgttgggatgtttctcactttctctcccatcctgttgccttgaaactgggtctcttcagtgaaccaaacacttcctgttttgctaggctctctgacccacctacctcttaggatctgcctgtctctgtcactcagcgttgaggttataggtacacataggcatgcctggattattaaataacttgaaatttttatttattactcatgtgtgtgcctctgtctgtgtgtgtgctcctgtgtgcgtgcgagtgcacccctgcttatgcatgcacatgtgttggtaggatgctgtgcacacgtgtgaggtcagagaacaacttcacggagtttgttctgtgggttctgagggtcaaccttgggttcccaggcacatcatcaggtgtccagtcccttattcccttaggcatcttgccagcctggcctctacgcctggctttcatgtgatttgaacttccgtcctcatgcttacaaagcaaagacatttagctgctttacctctaaacccgtgcttttatttcttaaatatgtccactctatctggatcggttgttgttgtttgctttgagccagggttttgccatgcagtttatgctgcttttagatgaagctcctccttctggtgctccctgaggactggggtgggagtactgagtactggggtgagagtactgaggactggggtgggagtactgaggactggggtgcaggcagaggctgtcattctgggcccctcctgtttgtttttgatgcctttaacttagaagaacatctgagaaagactaagcactttcagctcacttcatggattttggatgatctggctcatttgcatatgaaattcttttatctttatcttctgttatttactgacacagttttctggaaggatgtttgaaatcatgactgcttcttttttttttttttttttttaattaggtattttcctcatttatatttccaatgctatcccaaaagtcctccataccctcccccccactcccctacccacccactcccactttttggccctggcgttcccctgtactggggcatataaagtttgcaagtccaatgggcctctctttgcagtgatggccgactaggccatcttttgatacatatgcagctagagtcaagagctctgggggtactggttagttcataatgttgttccacctatagggttgcagatctctttagctccttggctactttctctagctcctccattgggagccctgtgatccatccaatagctgactgtgagcatccacttatgtgtttgctaggccccggtgtagtctcacaagagacagctatatcaggatcctttcagcaaaatcttgctagtgtatgcaatggtgttagcgattggaggctgattatgggatggatccctggataaggcagtctctagatggtccatcctcttgtctcagctccaaactttgtctctgtaactccttccatgggtgttttgttcccaattctaagaaggggcaaagtgtctacactttggtcttcattcttcttgagtttcacgtgttttgcaaattgtaacttatatcttgggtattctaagtttctgggctaatatccacttatcagtgagtatatatcatttgagttcttttgtgattgtgttacctcactcaggatgatgccctccaggtccaaccatttgcctaggaatttcataaattcatcctttttaatagctgagtagtactccattgtgtaaatgtaccacattttttgtatccattcctctgttgaatggcatctgggttctttccagcttctggctattataaataaggctgctatgaacatagtggagcatgtttctttcttactagttggaacatcttctggatatatgcccaggagagatattgcgggatccttcggtagtaccatgtccaattttctgaggaaccgccagactgatttccagagtggttgtacaagcttgcaatcccaccaacaatggaggagtgttcctctttctccacatcctcgccagcatctgctgtcacctgaatttttgatcttagccatcatgactgcttcttacagtacccctcctccatgatgtttttattttctctcccctccaccccttcctttccttcttactggaggaggcatgatgctttgttcttagctgtgatcctgagcgttgtctgacattgctgtgctgcctgctaagtctaacttgaaactggttgatttagaccatgtgcaaatgcactaggtggatagatttttaaactgtgtggcaaagaaacttcaaaatgcagtgactcagataaggttaacattaatttttctcatcttattggtcagctttcatgcactgctatgctcagcagggtctctcgggactcagggtcccctcttcctttttttaaaaaaaataactgacttatttgtttgtttgtttgtttatgtgtaagtatgtgtgcctatgtgagtttacgtgaaccacatttgtgcccagaagagggggttggatctgctgctcctggaattagtgttgattatgagcccaccaatatgggtgttgggaactgaactcctgtcctactgaagaaccaacagtatgtgctctaaccattgaactatctcttcagccccagggttctttcctgttttctagtccttctactcttgtctatgttgtatagtccatgaagagggaagaagggaaacttaaaaagaaagaaagaagtcatttccctttttaaaggctggcaggaataggtggctgccctggctgtagctaactcacgtagcttcatgtatctgcgagggtggttgaggaatctgctctgtggcatgcaagccaagtgttcagttataactgggggttgcaggaggcaggatttttgatggaaagaaaaaagagaatggaaaataacaaatatacttgcaagttagggagccagacgtgattgaactacagcccatctgagacctgtgcccaagcatagcacagggaagctggagtcagttcgtaggctttgccttctcttggtggcgcagccctgtcctaacccacctctgctcacctgcttcaacttccatctgtaaagctggggtggtgcgcacctttaatcgcagcctttgggaggcagatgcgggtagatctctgtgagttctagggcagccagggctacctagacctgtctaaaacagaacaaaacaaagcaaaacaaaaaccaagcaaaacaacaaatacacattggccctgacccatgtgtaagcattggtgtggtccagccctggctggtgagtacagggctcatttaagcagattgcggaacttgggtcggtactgcagaaggagatgcatgggtttctgtgcttgggcctgggtatgtgtgtctgctagattctgagatcgctatgggtcagaaaggggaagaaggggtcagagagaagggcctctcacatgtagggtttagggcaaggattctttcttgtcttacaaagaaaaattatccagtgagttctccaattgagccactttcctgatattctcatttcattaatattaatattcatagtcatttatagtatgcatattacttacttatccatccagagtagcataactgtgtagcataaatcgagtgtcattttaatagaggtacagggagggaagggacagggaaggaggctagtgaatagtcacttatttagcttagggttctcaacagcttaaggcaaaaaaaccaaaatcttttgagtggcccttgtgactcaatggcagcctgcccagaccagagggagccagtgctgggagtgaacactagattcactttgaaaagtctagaaatgaaaagctgctactcaaggcataagaatgtacctgatggctccagacctgggagccagtgaaatcctgcagcatgtctggctcccctccggctcccatggtctctctctgagcatcccagtggctcctcccattcactcactctggtcactgacttggaagagaccaggatacttcttctaagctgtctcagggttgagccactgctgtgctcagggaggccaggccttaatgtgcttgtgataagcctttgatgttgatgaaggggtggcgcacgcctttaatcccagaagagacaggagggatttctgagttcgaggccagcctggtctacagagtgagttcctggacagccagggctacatagagaaacccagtctagaaaaacaaaaacaaaaaacaaaacaaaccaaacaaacaaacaaacactgagagagagagagagagagagagagagagagagagagagagagagactctaacctatagaatgtacttggttgaccagggagcctctttcaacttgggaccatggcatggtatagactattaattgcttttcttctgtaagtgtacagatggttgtgagccatcaggtggttgctgggaattgaactcaggaccttcagaagagcagtcagtgctcttatctgatgaaccatctctccagcccttaattccttttcaaaattcttggaactgggactatgggtgatagtaagcttgtgttgtgattctatccttttcccttaaaacagaaccaaaccaaaccaaaccaaaccaaaccaaaccaaaccaaaccaaaccccaaaccagataaggggtctgagggttagtggcttacccagcctcccttggtaaaacagtatgcttgctttgtgaaatcaattatgtttaaatcaatattccttagtctttcagtggtgggacttaaacccagagtctcccacatactaggacagtccctaaacttcagccattctccctgcattttgctttgttatctaaagttgctaatctgcttgtcagaaactttagaaagtaagcctgctttgtagaaaggcagcttcgtactttgtagaagtatagcgggaaagggccttcgattgtcactatctgctgtgatcttgtttccggaggaaaaacaggacaagaaccaggtccttggcctgtctgtccgtcttcctctttttgccttgtggcttctccttgtgcctactccttgaggcctgacagggcaatcggtcagggcactgtggtggactccacagcagtgtgggcagctatggtgagaatgtggccaagtgggtgacttgtgttttggggctgggtgtgggtagaagagaaggcttggcttgattgagattgtgacaccctctggggctggcaaactctaacctcacatttctgttctcactaggcgatgggcgttaatctgctcacccgcttggcagtgctttgttttagagaatattaggtcaggccattgtctctcagtagacatttggacaaggtagccttgcaggagagacagtgccatgggcattctcatgtccttgtttatgccattgtgccagtgggaggtcagtcctacctgccaccggagaaagccatccagcaggggccagcctgccgtgcatgagttcagacagtgcggcaccagcaggaacctgcctggaaagaaaacacttgtggatggcacagccctggggatcgcccacggtcttaggcacagctgttgtattgccacttgacaggtgagaacacagccctgtgagctcatgatggtttgaaactggtcctattgctggcctaatcagatcttaatggaagaggcagctaaggtgattcaggatacgttttccccaggtagtcctttcttcagttttttttttttctcaagtctgtgcaggggtgagggaggggttggggggagaagggaagggcctggggagatggctcactgcgtaagtgcttcccataaaagctggagtacctgggtttggtacccacacccacgtcaatgctgagcaagatctctgtgatggctaatcgtggttgttaactgacatacctgggaagaaagaatattgattgaggatagcatccatcaaattggtctgtgtgcatgtctgtgtgggttggtatttatctatctatctatctatctatctatctatctatctatctatctatctctttctcttgaactttccccctttctttaaagattgatttatttttattttatgtgtatgagtgttttctctgcatgtatgtaaggactccacatgcatgcagtgtccagaagtggattactagtaactgaagttactgatggtcatgatctgccatgggaaccaaacttgagtcttctgtaggagcaacaagtgctcttaaccactgtaccatctttctagttcttgggatgcaggacatcttcttgattgttaattggtgtattggggcccagcccactgtgtacattgccatcccttggtaggtgggtttaggcagcacagtaaagccaattgatcaagccagagaaagcgagcctgtaagcagtattcctctatggtttctgctcaggctcctgcttagccttctctgggggatggactgtaaggtggagtaaaccctttcctctccaagtgacttctggacgtgatggttatcatagcatcagaaactaaagcaagataacttgtgtgcctgtaaccctagcattggagactggcaacaggtggacccaacaggtggagcgtgggagcaaaaatggcaagccttaaggttcagtgggacaccctccttcaaaagggaaagtagaaaggaataaagaagacttctgatgttcttctttgggctctgcatacgtatgacatgggcaagtgtaggcacatacatgtctgcaaattacacgcagacaacctgacacacacacagacatacatgcagtggaaagagcattccactgtgggactgtggttgtagctcagtgaaatacagctctgtccagcagagctttggattctatctcccagtattaattaaaagaaaaaagaatgaagcggaagaagagaaagaagaggagaaagaggaggaggaagaaaaaagaggggaaggaagagaaaggaggaagaagagaaagaggaggaggaagagaaagaagaggaagaggaaggagaagaaaagaaaagattattggttcctctttagatatacatggtacttggtggctcttactgacttcatgtagttgaatcacagtgaactctgagttgggctatgtacctgtgttgagagaaagcctaggcaattggaagggtaagcacattggtctgtggggttctttgttagtgctgttttcatttacattactttctttgaaaattaaacacaatctgttaatcttttactttatgtaatacatgagtctaggagtcttagccaatgtcctatgggaagtgtctggagacatattaacttttaaaacttcagtcagttatttacagcataagagctaggaacatgggaactgattgcttgcttgctaaatacctagactgtgaggaaaattcattttaaatggagaaaatatttcctaaaaaagtcgagggaggtagagagctaggtaggagatgaaccttcccagacttttgtctcatttatacttgtcattaattctgtggggaagatacagttgtttttctttctagaaattactcagattttgagtttatcgccactcacattctaaattcatccagagatgattttgaaaacgagagaaaacccaacaaaaatacagagaaaagaaataagtatcttgtcactaagttaaggtcaaaaggctatcaaaacacacccacacatatcacatataaaagttatgtatgcattttatacacacacacacactctctctctctctctctctctctctctcacacacacacacacacacacacacacacacacacacacacacacacgttgtttttgagagtgaatttcctgaggtagctgtgtcctaggactcacaatgtagaccagactggctctgcccttacttggctctccctcctctagaggactgggaataaaggtgtttgccgaccgtagctggctctactgaactcttgcctgctatatttagagatgatgttctatctgttgccttgttaaacttccgatgcaaatttgtctcaacttgtcctgctgggcagaaaaataaagaaaatgattagttacaagattgacactgcccatcaattttccaaactgtgtttgccaaagtggaccagttttgctttaagctcctgacacaaaagatctctttccccccagaacctcatagatggggcagagtagggcagggcagggagccacttcttcaactctagtcaaccgaagtaaatctttcttactactctctcttgtttttgcaacttaagtgaatttcactcttctcagggtatggcacaaggtgtctttctcccttacacatgctgttgttgaccttgctagggtttctgcatgtgcatattgcatttggtccaggtgactctgctttacggtcccatctcagttgttggagtgctgagatcacagatgtgtgccctgaatctggcttgttcacacacgatttggtgatcaggcttaggctgttaggcctgtgtggttagtgccttactacctgaaccgagcaccaccccttctgtctgttcttcacatcatttttgactttctctaggctgttgatgggcaacaatggggcatctttaggagttggacttaaatttcaggccagagtgttctaaagagacagcaactggctattaatgtcaattgtattattaattataataagttatttcgtatataagtcagaaggtgcctgagtttcagtcgtctacactgtagtgttcttatgaaatttcatgctctagcaggtgaggagacaagagggcgaggaagagagggcttactctgtggccaggacagttgctgctaagtaggattagggagggaaatactgaacaaggaaattagtgcctgccagtactctccagtcctgccagcttcaacgtggtgtaagcggcttgcaggtggttgctattgaattagcacatgcatcattgagtgctgggaccatttacctgacctggcattcttgagactatcaagtatttttccaacaccttctgtttcattggtgccttacttattggactttattgtgcctttgacacgaatggagatgggctggggaaggtgctgactgagtctagtaggctggctctggcaaaggctggagggcgcagctgcctggaagcagctgatcattttcattgcctttggctcatcatattaaacatgcttgtacacgcttcagtgtttgtttaatttttaccatagttatggttcagttccacaaggccctcgaagggctatatgccaaaaggcccatcgtcagcctgtggcactgttagataatggagatttgggggtgagccccagaggaaggaagctgttaggtcagggagatagaggaactgtctttgaaggtgatgctgggattccttcctctctgatttttgcttcctgggtaccgtgagcagcgttggtattccccgtgtgccctacctcaccatccataggccccaaaggatgcgaactagtaggctaagaacagaaacctaaaacaaggggcccagatagatcttccttcccttaaattattgttgcgattttgttacagccagagaaagcagcttgggaagtttccactctgtgatagcctcaggatcacagggtttgtggtggaatgctagtgtccagcttcaaagttctttctggcccaaaagttttccctttaaagtgtctaagaaaccattcatgtctaagacaggaaataaccactgcttgcaaaaatcataaacatgctgttctctgggctggggtgtcacagacagccaagcactggggttatagaactggctttggttgcttttctactactactactactattattattattattgttattattattattttcagaacagttacagattatttagtaagtatatagtaaggacatatttagtaagtatttgagtttcttggcttacatttccagggatcaattgtattaacattttgataaaactttaaagcaatttaggattttatgcacataaagtgactgtactgaggtactaaaataacagcagtaatttggccgtattgaagaataatggccaaagtcaagcctcacattcgaaaatggaggaaagaccatttcatattgtaactagaatttctctctctgtggagtcattttgtaaatattgcaatcaaatttcctattggctgtcaccatgtagaaaacaacagttaacagtgatgttattcatagtattgtctagtgtggtgtaatctcatctcttaggatgctgaggcaggaggattaccagtaagagtgaggccagtctggggtacagagtgaagccatgtgccaaacaaacaaataaataaaaacaaaacaactataaataaacaaaaaaaaccccaaacaaacagacaagaaagaaaaggcaaaaggtccatcctttgacctctggggtcacgggaaccattcctttcttggctactgtcatcaaatacaactcaagtccaggcgtgtggagatgagactattttaggttattccaaagtataaaccgaagaaagcaaaacttagagtcatttatttatcattcattttgtttttcttgtatacgcatgtgtgtgagtgagcgtgtgtgtacatgtgcacacatgcagtatgtactcttgcctgtgaagacctgagattgacattggatgttcttcctaaattgttttccaccttattttatgtgtgtgtgtgtgtgtgtgtgtgtgtgtgtgtatgtatgcatatacttgcctatatgtccaacacaccaatgcagtaccatagagtccagaagaggacttccatcctctagaaatggagttatgaaggctgtgactaggacagacttgctgctagcttgggttttagtcctatttggctaaaaccaaactatggtttggagagatggccccttgggtacaagtgcttgccttgcaaacatcagcatcggagttcaaatccccggttcaaaagctaggcatggatgctcttgtcctaccaatgagaaatggagatgggcagatcctgagagctcactggcacactagtttagccaaacatttagaaagtctatctcaagagaaaacggtgaagagagtaatagagagaaatactgatgtcctgctctggcctctgcatactgtatgtgggcacttgcacccataacacatttatgtgtgtgcattgtgcatatcacacacacacacacacacacacacacacaatttaaaaacacactttatgtgtttatgttagaattgagaaatgcaaaatgagaggtttactttagaaataatttattgcgaaactatattgggagtataggaaatacaacatgattccacttttttggcagtcacatacagctctgtgagcaatacagtcccctcaatgtttcccctatagtgtcttttactaatagcagtatatgactgcgattgccctaacatttttatattccttctatgaggcccgatagactccatggctttagaaatcatgctcctggtcacactatacatgtgggtttttttgaggcaagtttctcttctcatacggtccttactcattgctttttgcattgctagtgatagtagaatgttttcccattagatatttcacttgtggtattcagtttcctagtaatgctagggcctgagagttttgaaatagtctctttccagtatcttctgttgtacacaccatgttgacaattcctctcctaggtcagacacagctgtgggtgaatgtgttggctcagccccacacgacatgtagagattaagatgattgaagggaccactagtctctctcctctgctatgtcgtatcatcacagaacacggtgacattgtagagatataagatgctcagatagatgtaccagtctcttcactttgtcactgaggtatgtctgttcaggaggaaggtatgattttcctaagattaagttgttctatttagatagttaaaaccccagactctccattctttctgggtctctggtcacctggacctcaaaaactctcgctttatttcccccacatttcaccttctgtagacagtggtctggtggttttgtaccagaaaacgggagccttcatcagtttaatacatcctcagatgagcatactgggatgtttgcatttttcagaggactttgggttctgtctgtagtgtgcggcttgaggtggaattataaatattaggaaggagtgagacacctgtagcaagctgactgcactaccctaggagtttaagcatcagagatacaaggatactgggtgaggaaaggggggggggggcgggaggatgcaggggttgtttcccttttgttattttccctttagcctgagcgatggagagagttattgggcagaacgggaggtactgagtaaaactggctagaacctgtgttaactctgtgttacagaagtgttgcagtgagcattcatttagaacagcctagattatgcatccagggtttattggtcgccagcgagacatggcagaatttgattttggggtgttttgggaatctttcccgtgtgagtccacaagctggaaggtgtcccatggttctcaaactccacctaggactctgtattcacattgaaactctttcttgtccatcagctggctaaagcagcccctggtcaggtgctgctgacacacctctgctggtcctggtcgacgtgtacagatgcgcactgagtggctacagctaataaggaagggcagatctccattcgcattgctgaggcagagaatgcctgggggagcgaggggaacagatgatgtgtatgtgtgcctggtaacccactccaaacccatgggcttcaaggctcagtagtgaatcgttcttaggagaatctttttgcttttcagagtgagtgaaaatatgtcagcctactgggaacaaaatgcaaatgtttcttggtgcatccagtgtgttgttcttggtgctggttaggtttttctttgtctttcctcgaatccctttcttccccgttggaccattttagcagttgggtgaagccagatagatgagtttaaatgcacaaggtaaaattcatatgctgtaaaagaagctaattatattgccacatatttaccaaaataattaaaaaggcggagctaaatgatatttgtgcctggctagtgccttgaacagcacactctaatggctcttaccgtgatggtttcctaaaccaaatggtatttttcaaagtacttgatctagctgtaaggtaatgtgaaaatgtggagtggttttttaaacgtgtgtgtgtgtgtgtgtgtgtgtgtgtgtgtgtgtgtgtcagaggacgacttgcaggagttggttttctccttccatcatgtgggctctaggaatctaactgaggttttattagctgtgatggtaagcatcttacctactgaactacctactacctctcagctctgtgtgtggtttctgttggtgatccctgcaaagactgtagtgtgttttatgacctcacatcccagtggaaggggatacagattcctgttagaagttagcgggaataccactttcttcttcctgtctgaattcatgggcttcctgccaggtcataacccaggataaagatgataatatcaagtgcatgctggtttgctcagagcctggcaatagcggccgagtgtttcagaaaacctttatagcagaggtgactgtttgacatggagttgactgttctgtgactgtcccctactgcacaatctgtagcaggcagagcaacagacttccaccaccatggtgtctggactcttgaatgtgcccagtagtcggaaaaaaaaaacaaacaaaaaaaaaaacaaaaaaaaaaacccctaatatcataatatacagatagttgcttagctgcccagttgatacatattctgcagtgttctgaggggaatcacgaggcggctgagataggctgtggaagttaaggaagagctccttaaaagaatcatcagctccaggacttcatgcttgccaggtttgtgcagagccaggacaaagccagcaattgtgggcaaagtgtgctcaaggctgtgtgctgaggttggccaggctgcacttggcattttattcaagaatatttgtcatcctgatgggacaggagtcctttacctttcagtcagagagcaggtattatttagtactttcgcggatagatccctaaaagctttagggattcatatggattaccaggggctaaacatttaattgcaaaaccgagagagaccagattgcaaaatttgtaagaaactctcttgcaagagttagaaactgggagaaaagtatttgctggtctgaagttccttaatgtctttgctcagtcagttttgtctttggcttgaatgaacagggaagcctaaggtggcaggagaggcgaggtacgggtgtgtgtgtgtgtgtgtgtgtgtgtgtgtgtgtgtgtgtgtgtgcttgcctttctgtttgctgaaccattagccctgtggtgtttgtagaaatttgtgctttgctggcctaggcagataagggctgtcacaagtctgggtttttaaggcgacagactcaatgcctggcagaggctctgaggtacacaccaggattgggctctgctcagaggcaagaatgtaaccaatctggtctgggcagttggggagggactcatctctcctcactcccatatactttggccctgtttttcaatttgactgcatcaaagccaggtctcccttcagccgagggggacgtgcatcttcgtgactccacagagcatgtactgctggcttgggaactgaaaccacatttggagggcatgctgtgccagggagaaatggaagagacatctgtggccacagatggagccagcagagagtcacaggcaggtaaaggagactcgcccggaatggtgcggttgcttggatatttttgttcataggaagtaaacggaggcactgttcagtcagacaaaaattggtatgacagattctaaatgatttggtttttggatggccggttcctgtagttttattttgaaatgtgtcagttttaaaggaaggatttgacgtcacttattaaaagacatcttggaaccacgattcactcggttgaccagacttcttgtccttctggtctgccacttactgcctatctgttgaatgtgtggagggatttgcccagaagtgtctgttctatgagaatcctgtttgggtaagaacctcactagctcctcccaacccccaaatcttcagtgggtaaaggggattaacggtggcaccaagtctccaacaagggtgtcttgaataaacacccacccctgtatccacttagcttgtctatttcttcctggtttgttttcttagtgacttgccatttgtttaatctctgctggtgctaaattttgtgatgggcttcttgaaaacataaatactgagagatcccttctcacaagcttggaactgcagccctgtgtggctgtgtagtacggtaagagacaagttctgaggtttatactaggttgggcccagcagtcacatgggacacagattggaactctcctgcctcggggaagatcaggcaaagaatgtttcccaaacagtggatgtttgagatatcagaggaaagtctagaagaacactaggcctatgggaacatatgggtgaggacacatcttcagttaagtgtgtgtgcccatgaatcacgtggtgaggtgatggtttccagtctgcgatgtgcctgttctctctgcctactgctccatccagctacatgggtgggcttttggctccatggttagtgcgctctgtggtctgcctctcctgcctgttaagctggtccttagcccttagctcgctccctctccatctccgtcctgactccctccagggtggactgtgccctgtaatcctctgcctcatgcctgctggtttgcttcagggcacctgccaaagttgcttctcgtgttgtttaatgcaggcttcttggccttccaggtcttgttctctgcgctttggagagtgtctgtccttagggtgacagatcctggggatgaaggagtcaagagatgtcgttcaagaagcaaaagcactcttttttgtttgtttgtttgtcttcttgttgttgtttttttcgagacagggtttctctgggtagccttggctgtcctggaactcactttgtagaccatgctgccctcttacttagagatctgcctgcctctgcctcccaggtgctgggattaaaggtgtgcgccaccactgcccggccgggcaaaaagcactctttattcgttgaaatttggggctgttctgatgtaggcaccaaggactttcactacgatcttattcaggacctttgggtgtgacctcagtggggttattctggaactatttgaaaaagttaagtgttaaaaaaaaaaaatccaaaaatgcaaggaacagagaaacactctttggaataattgttataaacagaaggtaaattaacagtttcaaagaaaatgacatggtgagattctttagatacaatcatactttataatattttatagttgcttcccacattttatttagttttctgacatggcctggtggtgttgcttgctgacttattcttgtccgtgctccaacgacggtactgtattcctataattaatatcattataatttaacccaattaaaccctttacattgcataattagtagtgatgttctcacgctgatagcatttctttatcccagtaacagacatttgaggggtcaataccatcataacatttctccactccttctgtcggattttgttgttgttattttttctttgtatttgttttttgaaaacaggattttctgtatagcccagtcaatgttcactgagctcgtagggtggcctccttctgtgacctttctgccccctcacatcccaagtactgggactgcagacctgccctgccacaacagcttctctgacagcttttagatcttaccaaatagcttcgtttctgagaactagaagtagatggcttaatgaccgtgacttgtcacttggcttctaactgatgacggttgccctacactgttagctcaagggatggcaagctggctatctctggggaggctatgttcccaggcatgtctcttgccctctgtctctgcttcccaatttgtgttctctttttgggagaatggaaaaacaaacaaaaaacaaaccagaaacttaaaatgtttttattcattgtttgagaatttcattcaatctattttcatcttgttcctcatcctgacccctccaagattagcctcacgtcccaactccctcctgctcatgtcctttaaaaactgcatttatgtcctactttgggggtgagctttggctctctttattgtggagagcattttctgctcccctcttgcttcactcccgttcactctcactcactaggtagctatggattgcttacccagcatgcaccagtcgctaggccttaaagatggtgtacgacggatgactagtgtctcggctgttttacggtcaagtgtgtttcaggcggctacacgggagaacttaaattgtggtctgtttggtgtggctggaggacggtggcactttccacttctgacatcattgcctaatgtcaggcttctgggcttggctttctgccctgctgaggtgaaaggcgctcagagacttcatatttccccagaggcacacacctgttgctgactcttcttgaatatgaaacccacagcctagagtcactttctttggtttctctttcctctctgctctttcaggtgccattgtggggtggggtgggggtggggtgggggtgggagtgggggtggggttgtgggtttcagggagtgacttggagaagagctggccaacatcacgggtccctcaggtctgtgacttaaatgcattcaggggtagtaaggctgtccgtcattgtccttctgtcatgacagtccacagctagtgtttgtgctggaggtcaggggtggcactggctctggcagctgctgccacctgacacctggacttgtagtgctttgaggaacgtctatttcctcttggcatcaaatggtttttggccgtggccgtgagtgaggaaaggaagtattgtatagtatcatttactttcataaaaatagctttggactctctgggcttcctgtgagtccagtcagtgcctttggagccagggagctgccttcgagggcaaatgatccggcagaatggagcggtaccaggctgggccacaaaggaagaaaagaacacttaagttggctgttctccttgctgtcatgaaaccttacatacctcatctttcaagtgggagtcagagtcctgacacagcgtaacctgtaagagggccatgggcatcagtggcagtcagtgtcaatgaacagtgaaggccagccatccctcaatctgggcaccacctgacttatatgctaaggactgagccggagcattcgttgctgtagcttgccattggattggcatccagctggaagtgatctgagcccaatattcttaatttcagaatcaactttgttatacttactgtatttatactttgttggccagacagccttactcacagatattccccaggggagaagactttactggcgagggtacagactggcaagcttggggaatgtctcgcttgctggaggggctgccctgggcctgcaggcctgtctctcgtttcttctttgaatctctgtgttttctccttgctaaccctgccctctgatcttctttctctattctgcctttctcttcatgctgatgatcactctcatcacaggccagctctgtgcttctcctttagcagagctcgttacaacctctttttctcagccactgcctttccttgttccttttgcagcctctggctactcggtcccaggacttgagctgctccttgcagtagggacacagcaggtgccatgatacctgtggcctgcagactgagtcccttggctggcctgggaaccagctctttcagggctgtggtgcacagaagagagcaatcctctttcctctccaaacctattggtcgaatgagcagcccacatcacctggatactgggaacttgttgctgagtgtcctgatttggagatactgaatcgagaactaacacttgtcctttctgtccctcatttggacactttcttgtgactcttccacattgtgttagaaactgcaagggcatggtctgggacaatagtcagtcagtaaagtgcttgccagggtcaggtcttgaatttaattaccggaaattatttgaaaaagtctgagtgtgctaacacacatttgtaatctcagggcagaggaggcagagacgggagcatccctgggcttcctggccagctagcttagatgaattccagcaagggccctttctcacaaaaacaaagtggacagtgatctgggaagatacttgaggttaattaacctctgggctttatgcacctgcacccaggaaaacacacacacacacacacacacacacacacacacacacacacacacagatacacagatagacagacagacagacacatgagacacacagatgcacacacacatatataaacagacacacagacaacacacaagacacacatgcacacatatacaaagagacagacagagacacacacagagacagacacacacggacacacatacatagacatatataggcagacacatactctatcatgtatacagacagacatacacagagaaactgacagatagacacagatagacaaacacacacacacatacagagacataaatgcagacacaaattcacatacatagaagacagacacagagacgcaggcaggtgtacacacacacacacagacacacacacacagacacacacacacagacacacacacacacacacactaccagatggcaaatacctctggttcctttcccagggatgaccctgtctagttattacctgggtttttttcactttcccctcagttctggccctaactgtcataaatagatgcttatctcattctcagtggagagaaatgatgacacacaagagtccgagtgggtggagtgtccatgtttggacgagaccgtctctgtgttagcagctgcaggctggctcttcgatgactcacatgtgttaatccccgtatcttctgaagagagagcaccctcggatttgcatggggacatttgcacagggaaagaaacagtcctgtggccagggttgacgtgcagacaactgtgcctggtggactgtagtggatggtgcccatggaagccggtttgtaagcagggatagagttgccttttggacggggcagctgatagggctgggtctttgaggcagacttcagtatttgcacaggcaatgtgagcgggtgccagtagttaggaactggggaaattagtatgtttagctgcagagagtcagtggggagacaggcagtggcaggtgacagtggggtagtgttctgagcaaccctatttgaacccataggctggtgggcatcatttggtcaggtttcccgttgggttttgttatcgaggataataaaagaaaaactcttggatatcttcttcacgccttgccataaagcttgagcattctagaactctctagaaactggtcaggtttttctcacaatcccaacaaatgttcataagaaaagccacttactgcccctcgctctacaatatgcaggatgcttacagatttctaaaagacagaacatgtaacttcagatatgctggcacatgactgtaatctccgcacttcggaggtcaaggcaggaggattgctaaatttgactatagtgtagtcctcagggtctcaaaaatcccaagctagggttggaggtatgatggctcagcagcccagagcatgtatgtaagtgattttcagaggacttgggtttagttcccagcacccgtgttgaacagctcacaactgcctgtcactcagctccactgggatctgacagccctggtctctgtggagatcttactcacatacatataaccttccacccacatacccaattgaaaacaacaacagcaacaacaacaaatctttgaaaaaaaaaaaaaaccctctaaactaaaccaaacaaaaacaaagaacaaaacaaaacatgtagatgattcagaaaatcacatgtccttttattttttaaaaatagtatttctaaattgaggcggtggtggtgcaaagaggcaggtgggtctctgagttcgaggctaccctggtctacagagtgagttccaggtcagctaccactacacagagaaactcttgtcttgaaaaaccaaaccaaaccaaatagtgtttctactttcttctttgtctttcagtgttttgtgttttgtttatcatttgcggtcttggttaagtaactgtccttccttccaggaatcgcccaggcaatggccttctttcctgccatcagggtaggtgctggtagtgggagtggctatctgaaggactcctgctctaagcagttgactatgctggtttctcctaagtctctgacaggcccatcttgctgctgctaagaggttgcctcaccgggcatcctggagtgttgttctgttcttccgcagagccctgtgagctactacttgattcgtgaaagcactggccacttacaccagaaagcaactccggccttcagatttagctgcttcctactgtgatgtgtgcaccctgtcatgagagaagagagagcctcgttggcttacaaccccagcttcttcccagggttccaaagctatgattcctgctttcccctcctcctcaccaagagctgtgatgtgttgtgtttctcctctgtatacctccatgatgctttcctgattgtgaggaaaggagtcattttaacctcaagcttgactcttaggaattcccttcccttccttattccaagttaccgccctcgccgttgcaaaaacaggtgatccttcaagcacatggtgagtgtgtcgggggcacatttctcagcctctgtgcagttggggatcttacctttccacgtgtgctgtagacttgactctctgtaacttggttttgtgaatgataatgtccttcagttccattgtatactaatatggtagtgaagacatgactttagattttatttatatctttgttactttgggaaaatagtctgatgtgaaattactccacccatgaaataccatccttgcctttgctttttttggctttgcttatttttacaagagtttttcctggcgttgactttttgttgttgaatcatatcagcaataatatgaacattctcaacatatgttgtcagcatcgcgtgaagagttcttttcaccctaacgtaggatttttgctaatgatctttaatgtgattaaaagccaagatagaatttcatagtgagacatgaatgaattaaagaaatcctagaatgttttgtgaggaactattgtttcttagggtttctatataagtgaattcagctagttgtggatcaaaaattttggggaaaaattgcctttctactgtatatgtacagacttttttttcataatattattccttaaatgagacagactgcttatattatgatagttagtatgagtaatttacagataatgtaaagattgtcagcgggtgggattgttacagcatcttacataagggacctgaccctctgggttttgatatctgcaggcaggcttggaaccaacccctttcagatactcaggagaattgcatcccaagtaatgtcactctgatgagaacatgagagggaaggctgatcatgtggctcgtggataaagcacttgccccgcatgcccaaggccctagctttgtaggtagagtgctctgagccaccagatgaacaaagatgtgagaagggagtgtgggggcttggtgaggctgtggggttcacgagtacagacttgggatccgtcttctgcagctatgatatccaaaggaagctccggatataaggaaagggattttccttatcactcatttgaagtttaacctggacttgacctgggagggaaaccaaacctggtctgtgggcttctttcagtcttctctgattctgttcaccacccctaagcatgtctgctgcagaaggcattgggtttcgttccagggagatgccttgggtcttgcttctttttgatttttttttttttgatgtaacctgtgttttctgatatatgatttctcttctctcatggcaggggtttaattggcaacactttgtttcaggctgggtggggacaggggctatgaaactcagcacatgaagtgatagcagaaatgaggagggctgaatgtctagcctggcacactcagggttagtaacgaccagctcatcagcatgaagcgaagcagagcacagacatagatagagcactgtttatggattcttcttcattcatatgtgtgatctctgatggaagcatgggccagaaacaggacagaatgggaagtctgcaccagatctgtagacttgtttgcaccattgttatcaacgttaactccctgtcaggatcattattccgtggttatgtaaaaggctcacattatgggaggtgacatgaaaattttgtgtgccatttttacaacttattttaatgggtgtaaggtcatttcaagacagtttataaggacatgaaacaaaagtgctcatcactttctatttcgaggcaggctattataaagaggtgagaaggctatcagagaacagtcttatacccactgctgttaagtagagattgcccgttagcagggcagggcgttcgctggtcttagaaatccgcaggtgaagtcaggcgctatttcagagtcagaaggacacagcgtaccgtaccggacctctttcttttcttgacatgaatgaaaagcaaagctatggcttccgctgaagggcagtaaagaagagctggcagccaaggacagtgctgtgctgagtctgatggaggagcgccaaggccctcccacttggtcaccctggtgttggggtgtggcttggcactggcttttacctggtgcttggcactgttaagagtgtaggttcattagtttggactgacagtcataatatgatgttcaaagccaagagggtttccccatagcaggataaggagactgtgtaccttctgtggctcagtcagctgacctgggcttgaaagtttgtgtgcttttatatttgtgtatatgtttacatatgtgtatatatttgtgtgtgtgtttgcatataggtgtatgtacacatgcctgtgtttatatttatatatttatgcatgtgtgtgtgtgtgtgatatgctggctgtgtttcttccatagcggatgggtatctgaatgtctttccttctctcccctgctttgctgtgctgcgtgtgtttcagctgtttatttgttctttattctctttccacgccattcctttctttccctgctggtgagaagagacctagtctcacagccagttgcttcggggctataatagagttagtggtatgtaccaaatgtgattacagctgtctcaacaccagatgaatgagagtgtgcataccctggacagataattctgacagaaatggcctattggtttcacatgagctaggaccgaggccaccgtgtaacctatcagaagaacagatctgtgaggaacaggttcccacaggcccgaagagtttttgggaaagagcctgtcatgagaggtttttaggagttccttcagataaccctagagaactgatggtcacgtcattttttcccattctcaggggttaggggtagccccagcgctttgcccaaaggttgctccatctttcatcggtcctgcagagaagccagggtggtggctaaatgggccgatgtgtggcttctttgctttcgagctttgatgtcatttctatttagctcagtgagattgttttagaaaatttcccacagtggaaagttctcttggacatatgaaagttcaatggtcactttcaaaatcagccatgtgccaagaaataactaaaacaatggattgcgtagtgcagcagccttgggacatggaaaaatttaaaagatgtatgattcatattattaatacaggttgtaagacatgaggccttgcgttggaaaacagaaaagggcctttctgtttttgttgtttataatttctctttctgggtaaaataattattcttattttctatgatgattattttgcctgtatgcattcagtgtttgtgaaggccaggaaagggtgtttgctcccttggaagtagagttttcgtggttgtgagctgctatgtggttgccagtaactgcacttggttcctccccaagagcagttaggcctcctaaccactgagccacctctccagctccaagtgctattttcttttgaacttatgtcctatcttagggttttactgctgtgaagaaaaaccatgaccaaggacaacatttaattggggctggcttacagattcagaggtttagtccattaccatcaaggcgggaagcatggcagcatctaggcaggcatggtgcaggaggagctgagagttctacatcttcatctgaaggctgctaggagaagactggctcccatgtcgttaggaagagggtctcattacccacccctacagtgacacatttccttcaacaaggccacacctactccaacaaggctatacttcctaatagtggcactccctgggccaagcacagttcaaaacaccacatggtcttgcagtattttctttgctgtactttatatagattttgttctgtttggtttttatgagggaggattaaaaaagttaaattctacagtagaatgttacataaagaggtaattgatatcatcctacatgaatttgttcagacatgctaaggtttgaaagaactatcagacctttgatttggactcttttcctcgtttacattttcaatgctatcccaaaggtcccccatacccaccctggactctttttttgagtagtcattgtattctcccatatcaatacttttgatagggaaaggtaatttaaagttactgtctgcatatgaacttggttacctttaacctgtgtgtgacagctcagtgggtaagcatgctggcttccaggccaggcaaccagagttcaagccctaggaccaaccctgagtgtctccctgaccctcacagggggtgacttggcttatgcccttgccccataaatgtcacaaaggctcttttttggaggattttctcccgaagaatatttacaaataataacttaccaaagcctgcagtcatttggtctacttctggttaagaagacaaactgtagcaagtgcagacccacacaactatgccaggattccctggtccctttctgaagctggctcctgctgtagatgggtacctcttttctctgggattatgcggggtcaggcttccattcttgcttgttgctttggctacttagctctgcctatgggaacggagatgctttggtttacgatggacagtggatatggagtgtcgtcatggaactgctggggagaatgttaagtggtagagccagtttggaaaagtgcacagtggttcttcactacattcatagtgttatataattcctttgtggctctcctcctgggatttatgttatctccaggaggagtgaaaatgtgtccatcgacgtaatttacatgcggatatttagagctgaaaagttaataatagtccaaaggtgagcccaatgcagttgcctgtgaacggatgaaggctgcgacgtgccttatccacgcaggaaagcatcattctgccacacacgatgagatattgacgtccgcttcagtgcagaggcttgcaaacatgctaggtgaaagaagccagacccaacgcagcaaattctgctgatttcacttataggaagtatctagaaccagtgaatctctggagaccagagggagatgggagtagctgccttgggctgggcaaggaagcctgtgaatgactgctatctgcaggagtgaagggaggctatagcattgatggtggggtggctgcagagtctgcaaacacactgatatctgttgacttgggctctgcatgtgtacttacgatttcctactacgtgggttatagcagtaaactgggttttgactaagtgacatgactggagccattctgattctttactgtctcaccccatcttattccgttggaggatgaggatcagaggacagagtgcttagttgttttttccagagtctcaagtctatggtcttctgagctacatagataggttccttttacttggaactcctgtggaccctggtagggttacatattctgtgagaatctttgtgctaggtacggattctgtttcagaggaggaaagaaagctattagatccatactaaggatgcaggcatggcagtacaaacacctttccttctcttttgcacgtgtgtggagaacacatatgcaaatgatgtcaagagaacaaaacaaccatctaaaacagaagtctggaaaatatgagtctgtgtggttattgtttttttccaccgtagcagtttctttctcttttcctttgtggtttttggagacagggtttctctatgtagccctggctgtcttggagcttacactgtagaccaggctggccttgaactcacagagatccacctgcctctgcctcctgtgtgggagtaaaggcgtgtaccaccaccaaagtaaacactgttgtgagtatgcatagtggggtgtgtgtgtgtgtgtgtgctgtcagacaccatcaaacaagaaaagttagcatctctctagttgctttggaacattcaaaagctctaagctgtgactattaaaaaccaaaagtacctcaagagttcttaactgactgcggagtttaacttcctgtctgaggggaggtggagttagatttagtcagatcctctcgtgggaaaaaatcaaagggactttaaaaaagaaaaaaacaaaacccaacctaacaggacatcccagtgtgcagttcgcgggcggcttttgtgttgatttccttcacagtttccctcatctcagccactgtaggtgatgagcagcctggcagccaccacatttcgttggaaaaagtggaggttggatctgcctgggcaggtgcctctccaggcttgcaggagatcccccggtaagtttgtcagtggccagactgcagttgctaagggaggctttggacagagggtgttcgagttggcagagcctcactttctctcgataagtctgatgtgtaagtcaggaagcggctgaaagcagggcttatctgtgacaggcagaggtggcctgttcctccagagactaggtctctgtggagcggaagagcggccacacatcaggtgcttttcttctttggactgaagctgttgaacgcctttgtgtccaaggtttgccactttattcgaggcagctggttcagtattgagtgcttactcctgtttcatttttattaatcatgcattggtgttttgccagcatgtatgtatgcatgtatgtatgtatgtatgtatgtatgtatgtatgtatgtctgtgtgaggatgtccgagtccccggaattgaaccagtgctctcaaacacagcagccattctccagctccctgactgtttactcttaaagagaaacttttcctccgtggcaggctactgatgtagcccaggctggccttgacctctaggtcttccagctccacctctggtgagctggattttcggtgtgaggcaccaagtcagatgctgaggtgtggactgttgacagatctttctaggaaggcaacattctaggaagtacagatgtagttcagagctgagaaggagcacaaggaagcgttgcactgttggtggattgttggggtgtctgtttactacattggggtgagtgggggaaactgggggcttctgtttcttacaggtttgtccttggaaaggcagagcttccagggggttggtgtcctgacctttttcctaattaaagtccatttccagagtggcttagtttttctgatcgttgcagacatccatgtattcttagatggattcatggatatgctggctctgtggtctgtctgagggaaaaaaaaatcctaaagatgtgttttcatgtgctgtaagttctttgagttaatactttccctagaaaagaacagaaaccaaaccagataacaacaaaccataaaaaaaccaaacaaacaaaaaacaaaataaaattaagggtagtttttttttttttaaaacacttctcttcattgcaattcttccctcctttcaatattttggttcgtagtaacataggaacactgcactaggtgtatcctataagcatgctaccgaaataagagggccagcttgtgttttcttagagatgagctttcttggccaacagctctggggtgttcgtgtgctgcaattatctacattgcccctgtctttgttttcttactgaggagctctaaggtcccaacatataatcatgagacctttcagggctgtgacgaacgctccctgaacagaggtagtcacagtggcactgtgacctttctgaaatccctttaagtctggtggacttctcttttctcctgccccagatgtcagcctacaccttgtcttgctgcagagagtctggagcagctgctgtggttgcagtcagagaccaaccagaagaaaattatgggccggagtaaacaaagttactagatgacaaggtcagatagtttaaaaactgtcctggctgagttctgctctgtttaggtagtactccttcctttgctctggctgctatagagactttgtgaagataacatttaaaaaataaaaatatttcagggatgttattttcataaaaatagaaaaccagtgtttacctggtcccaaattctataggagttcagcatcttttcttttaaattaagctgggctcattctagttttgtaatgcgttatttcttcagtgatcttgatagaagtaaagataatagaatcagtggttaaagtggtattttgatggaacacacagtcaagtaccagatgatgcgcctgaggtttcccctgctcagggaacaactttgggagagcctgcttagcttgccacccttcccactctcttattggctgctgagactccatgcctagattggcatttcctttttagatggatggagcagacgatccaagactccagctgtctattgtagccacctgtatcctgaggctctttccagaggctctgatgtggctgaactgagacagtgactttgtagctttgccatagctctctggagtgtcctggatggagcagtgtggctgggcctgtggagacgatgacttttgtgccaactgaactggcagttagttccaccctagatggataagaaggcattatctcccccatacccaggtcaccacctgaggaagcagaagtctgaagtgctgtggggcgagcaagtggattccatgggtaggatcaggcaaagacttagcttccagtgtgtgctgatgttcagggcgtggtgtgtgatgctgagattgacagctgagagggagaagctcaagaaagtgatcttaaggaatgggtgactcactcactggaatgttctgatgaagcaaggaaaattgggagctttagaagttagatttacaccaggaagtgtgtgtgtgtgtgtgtgtgtgtgtgtgtgtgtgtgtgtgtgtgtgttacagagattaagagtgaatgagagaggggaggaagggggagagggagagggggagaagaaagggagagggagagaaggttggagggagatttggaaacattggcaggaagttcccctgtactctagtggcttcttctggtgcttgggttggcagcctgcaagtttgatttcccttgaatgttgaggtcttctttaattccttttagttaacatgtagctacctggtggtacaggctgtaccctgggaagcgctaagagtataaaattgcctctatggggcatgggctaaaatctggggctgggtaagaggcctgggccattgttgtctgacttgccagatgcttgaccccatgatggagctcaggcttgagagcatagtgcaggccctgaggtgcctctgtaaccctgctggctaaagggaactgagaagttggttctgaagaccaggtagcctatcaattacaaaggcacaagaatgccagtgatttggggagaagaaaggcagaaggtgaccagagaatcgtcatcaagaagaccctggagcaatggttctcaacctgtgggttgagacccctgggcatcataagaccctttcacaggggtcacctaagaccattggaaaacacagatatttacattatgattcataagttgtgtaaccggtaggacataaatggattgataatggacttggactgctgatcagtgtctaggaaaagcaaatcagacatatcaaataccaaaagtacccaaagacatgtaagctacaggctctcacctcctcatctcctgtgtatttttccttggtatcacttgaatggctgctcatggacatggtcctggatctgtttaatgttttcccatccgtttctctgacccgtgcttagagggcaccaggtgcttcctgtttcaatcattagcaggttcagcacttgttggaaatcgatgttaggtactgtgtggtaatttgataggatctgggtctagtgctcccccattcctgtctcagcactttgaccttcatctcaacagttcagtgacctggcaactctaagtagttttttcccactgcaccaggacttgcattgtttggtggaggaagatgagtcatagcctagttctgccattgtgtgaggtgaaatgctagtctagggctaaagaacacaggtcaggctttttgtgtaaatcagaataatcgaactggggggggggtaggtgggggtgacgggattatgggccagggtggccattttggtgaaattactctcatcttggaggaacattttattttaacggatgtttcacttcaaacctaattcttaataatgctttgaacaatcttaaggagtcagactccttcaaacaaaaatctatacagaatcaaaattatatgggacagaagaatgtcctcccctccccccctttcctcccatccccataaccagggttactgccttgggtgttctgtgtaacccttttgctatgagtataaaaatataaagtacaaaagttcctttttgtatcaaataaaaatcgttgtgtgttagtagcatgcaattaaatcaaagcaaagcaaaaacaagccacaaacaaataactgaaaattacaaatattaatatcagggcctacacatcttagcgtactgggctgctgtgagagcatgtgtgcttttattattacgctgccaccgtagagggtgggtgagaggatttgtgtgtgtgtgtgcctgtgtgtgtccctgtgtgtgccaatgtgtcttgagacaaaccttccaatcatcctttcctatgctggtgcccgttttcttctgttgtgtggatccctgattttgaaactcttagcgattccaaaaccaattcctacataaaacgggggagtttgaataacttgctttaattttgtttgacttttaaggtggttaacctctaacttaaaagattgacatccttttgctggtctgtgagatagaggtttacgtctttggactcagaccccacattttccctctctttttggtggctgtggacacagctgccatcctaaaccacacgagaccagtcattatttaggtaccctcaatattttattacatttttcatatactggtaattaatttcacatggatggtaagcccggaattctttaaggtccatacattgtggagcctgttacagtcagggccaggaggctgtggagtgaaacttgaaactaaatagcagttctcttggcactgaatgcagtgaagcctgtggctggagggcggcctcagtgctaaggctacttgatgctcttgcataggaccccacatggggtggctcttaaccatccataactttcttccctgagacccaacagcctcttctggctttaaaaggcacccacacaccgatgaacctacatatactcatacacacaaatacacttaaaattcaatgttagtggtgcctctacctcccacccccaccccccggcagggtttctctgtgtagccctggctgtcctggaactcactttgtagaccaggctggcctcaaactcagaaatccgcctgtctctgtctcccaagtgctgggattagtagtgtcttcaagatgaagttggtaaggctcattttgttttgtaaagacatgtgaaaatacaaatttcttatctaagcccagttgagggaaggattataacaaacgaggaccacttatgataatggagtctttcaagttgatatagaagaaagtacatgtggttattaaaggaagatgagacttttgtttcaatctggcaccgtgcttaccgccatttattatttgttgctacgtccctattcttcaatccagatagatcccttaggaattttccacgtccgagcactgagcctgtaattttaggctgggttcatttaactgtagatgctctgcatggcaggagctacacagccatacaggagacacgagctgtgtgggagatgtgatcgaggcgtggtgcccaacgtggtgttgctgtttttagagttcactttcatttgctcagaaaggatctccatctctgtttgctggcaagcagagagcctgggcacctagctgcccctctagttctctgcctcatgacctagttgctttctggtgtcttgtacaaaaagctttatttagtctgcagagaggtttatttctccaactaaaggagcgctgtcaccgtagtctaggagcatgatggatgcccagtgagtgctgttgctcagatactacaggaggctgaccctaaggtgctaggaagaaagacaccgagcacagattcctccagctagctttgcacatcatcatcatcagtgaaaatactgccagatagccatttgcctgaccctccacaaagcagctcctcttactgccccagctctgacccttttctctcggttggtacaacaagctccttgttgagaacttagtgccaaggttagtctcctggcttctgacctggcctgttttcttgctgccttctgatctgcatgctttcagcttctgcttggtccatggcatttaccccttttctgatgtttgtcgctgctgggtggttttgctgatccccttttgtgataactcaagagagagactcagccatgcctggtagtgtctgctagttgtctgaattagttaagatggctgtaaatatgcatcagctgggcatcatggtgggcgtgcacttgtgatgccagcacttggtagggggaggcattgtttcaggccagcctggtggacacagtgaggtctaggcaagtcaggattaaataatgggatcttgttgaaagcatgcaagtgagaatgaaaaaaaaaaacgtgtatttattatctaactctgagtcactagtgtataacaggaaaagtatagtcagggtgtttttgcatgccctgccagagagcagttctggtctggggtcctatgatgaaaaatccctagcctgttgctatgctctggggaaaaaaaaaaacaacaaaaaacaaagaaatgatctgctaagcacatattgagtgcctgctgttttcttggtcttaagaccaagtggaagtattatagtgttttttgtttgtttgtttgtttgtttttaaggctttaaaaatttatttatttatttagtgtaggtaagtacactgtagttgtcttcagatacccctgaagagggcatcagatctcattccggatggttgtgagccaccaggtggttgcagggatttgaacttaggacctttgaaagagcagtcagtgctcttaacagctgagccatctctccagaccacttgttacagtgttttaaatatatgtattttaaagataagatttattttatttatgtatatatgtctatgtttaaatgaatctttgccatatgtctctagaggccagaaaagggtgttggattccccccacagctgaagttacaggtagttataagaagcctgatttgggtgctgggaatggaactcaggtcttttggaagagcagcgggtgcttttgacctttgagatatctgtccagccctgggctagactgttttatcctcaagtctttgggatctcttttggtgggttcctgttctatggtcagttcccaggcaacagcttttaggatagcccatgctccagttgtttgagacccacatgaagaccaaactgcacttctgctgcctatgtgtggggagttttaaataggttttgttgtattgttttgctttgtagcccagggtcacagcatacactttgcagacagtgcacagagctagtgataagcgtttgtcctgagtaagaggagcaggctcatcagtgatggtaaggtagggcctcatctcatgcttgagtgttggctttgaggtctagatccgtcctgtgaaaaggtagtgagtgggtgtgagtgtcactgacatcaacatcctgatagtactgatgtgcccaccagcaggcagattgcagaggacaggaaaaaaaaaccctgcagtgctaagcaacctggtcaagagggcaccatgttgctgttcaagtaggctaaaagtggaaaaataattagcatgtgaaaaggcttgtttgtggaaatggctgtaagttaatggaagcaggttgatttttctgagttggaacacccattcaacctcaaaataatgttttcacattttgtcctaccaaaacaccaactccccccaccccccaccccagccctggttttccagcctgagtgtggctggagttgagctcatctgctctgtgggcttccagctgtttgactggcacttgaaagccactgagaggcattccaaagcttgagtttctttgtagcccaaaccaacctggaccttctgatccgaaggctgagatgacaggtgtttaccactggaaaagtaacttgtattaacctgatgcaattgttgactggtctccttggcttatcacctcagtctgctaacctaggcctagttctggaagcttctagtctccatacaatctaatctaggcctagagtgttttcagccactgagacttacggctgaataggctcaccctttttttttgtttgtttttgtttttgtttttgcgagacagggtttctctgtatagccctggctgtcctggaactcactttgtagaccagactggccttgaactcaaaaatccgcctgcctctgcctcccgaggcagaggctcaccctttcttattctttctgagctctggctggctgattcaactcagctgttctggctcaaaactcctcttcaactgactggtccaatctggcttctctctcagcctattctgaatggccctgcctggcctcatactatctttggcaatatgttctaatcttctggctccttctcattctctagctcattctgtcttcatcagtgtctagtttgttctctttctgcaacctgtctctgtacaactgtcctgataaaactgcctccttctttctccttttctgtgctgctgctccctcgggtcatttccctttcctcttgtgaaacttgagcatatcctactctgtcaaatctttctctgatttgacactttgtctgccactcaattagacaccacttacaagcatgggtgcttccttctaaaaactaacgttactttcattgtttgggattaaaggtgtgtgctaatggctgagccacaccattactagaaacaggatatatatgtatatatacatacatacagtaaataacaaaattttggggttcacagtgtgatcaaataacctgcaacatgccaccatgcctggtttctctgagcctgagggctgaatccaaggttgcttgtatgctagcaagtgctggacaactgaatcatactcccagctagctgcttggaaagccaggtgcttggaaagccaggtatgtcctcacagtttattctgcttttagaataattctctattcaggtgatcaagtacatcttgtccaagaattcttccctgacttctaaatatgagtttccttcctctctgatctacatctttcccaagggatcaagttcagatatccctggatatattccccaacactgcctttatgagatatgctgctgatctgtgctgttgaaagctagtctgtctctgccatgtagggcctgggaacatcttttttgcttctactgctatgtgtctgagaaccttcttttaggctctcagtttaagtcttgtctgttcttactaacttgattcctcagacccatcccagttcctgggttatttgttggcttagggattttttggccagtgaacaataattgactcagagttgtatggatgcaggcctacgtgctggtggaatccagacatctgaatgaagtcatatgaggaattccagcccactaatctttattgttttgttttatagatcagcaatatgtgagaatttaatacacattatggctagtttttgcttttgtttatgtttgagaaaacatattatttgtattttaactcttaaaatatttttcctcctctcatttatttgcttattgtacattatttttagtgtgatgtgtatgtgtgtttgtttgtgcatgtatatgactaggaatggatatggaggccagaggacaacttgtgggatcagttctctttttataacatatagactctggggattgcacccagagtgtcaggtttgatggcaaacaactttatgcacatcttgctagtctgcacttttacttttcttttagaaggttttacatttacaggaaaattgtaaagatggttctgagagtgtactcagtcccttctctacttagttaatatcttaccatcattgctacattttttaaaacaaatggaccattagtatattaatcatgaagtcattatcagaaatcccaagtttccttaagagttattattgatttaaaaaatatttatagctattatttataacatatcacattttgacttgaattgtttttgagtgtgctcaggctcagagcttttgaatccttacatgtcatactttgtaaacacattgacaaaacagatgaaaacttgtgacgtgggagtcagtctctgatgagccttctgggacctggtgaaggagaaggctattttaaaggctgacttatgtctaaaatctctgcattactttgcagtaatgaaaataattacttgctagtaccttaggttttattacacatgcgtttgagttacttataatctcctcaaacagaaaggatcattcgaaataataggtatggaatagcccttgaccaatcagatccaagagcaaatgaccagaaaagaggcccactcaaaaatgaataactgccctgctaacttttgagtgccctataaatgtctctagacattgtcgtatgattcagttggtagtcctaatgtaaggcagtcatagcagccaggctctctgacagtgagtactgtataaatgtttgccatggttgatgtcttttttcatttgttatttctgatcaattaaaaacatttagcttagtgggacatcagacggtaagtcactatgtgttaaaaatgaggttctaggccagtgaggtggctcaggaggtagaggcatttgctgtgtggcagccctctgacctgagtttaatctctggaactgatggtgggaagatgagagttaactactgcaagctgtcctctgacttctacttgtgtgctctggctggtacagccacatacacacaacacacacatgcagacaacacacacatgcacacacgtgcacatacagagacaaagagagaccgagagagagagagagagagagaggacaggcagagagggagaaacagagggagaccgagacagacagacagacagacagacagagaataacttaaagaaaacctgagaacttgtttaaaaagataaacataagtttttcattcttttatgatgcggttgcattttggtgtagggatatggctgagttggctgagcgttgtccagtatgtaatccatgagaccctgccttcaatcccgagtagcacacacatcaggagaggtagctcatgcctgcaccagaggatcagctactcagtgtcatccttggctacatagagaatttgaattggaggctagcctgtgtgctgcgagagcctatcttaaagaggtgggggggggggcaggggtgtattttgaattcaaattttcttagagactcccactgcagaagagggatatagatctctaggttgactgctgctctctgcactgtccctttggttcccgtgggaagaggagacccctgaaaggactaggaggtgtggaatttggaggccagtttctcccaaaccccattcagctacctgctgcctgctttgagtgatcgcagcagcatgcttggagcctgtactttggttcctgccaaatctccctcatttccccatgatgatatgttattagtctcctgatccctgttatttgttaagttaatctgcgctttgggaatctagtaagatcacagcattttgtttttgtgacttcattttgtagtatatgccctgggtgggtgcagctatgctggagttggtgaaacccaataacttactgtctacaaacatcattttatacttagccttcctgccctcttcagggttccagaaacagacacctccattgtttaagcagtccttctgctatgttttctaaggtagccattttcctattaacagaatgtgttttttttagtccttaatccactgaaacagaacagtgtgtgggagcagagggtgagatgaatgccccatgtagcatcttccatctcagcccttctgtggaaacgtgggcagccttactgtgctttgaatgactctgttgtgtttctcagtaaatacttacttgctaatattggttgattatgaagttcttcttgttattgttttttcttaaacccaggctgacctcaaacccattggtagttgaagatggcaggaacctcggatcctcccgcctctaactagtgttgggattacagacctgtgtcaccacacttagtttgatgtgacagtgtggactctgcccaaccataggcattgctgagagagaattagatacgtattttcttgtttggtttggattttcaagacagggtttctctttgtagccctggctgttctggaaccctctgtagatcaggctggcctcaaactcagacattcgcctgcctctgcctccccaagtttgcccagccttgttctggattttgttactttcattgtcattggttcctttctggattctagttacttatttccaataacttcctatgaacctacttttgggataagaagtttaattttaggttgtagggatggtgctgattggtcctatcccccaattggttcctgatctgtcagtaaagatgccatggaccagttactgggcataaggaataggcaggacttctgggcccccgcaggcaagcaggcagactcaaggagaagagagagggttttggtcatgctttggaaggacaaaaggtgacccgtctgtcatgtgagatattggacaggatggccacaggctggttctacaggcacaaggttgggattcttgagcttggactaacaactgagcagctaaaattgaaaacagatttagggttgtgagctaagagtattgggaagcgtacactagccacgggagtttaataatgcccagcaattgagccaatgaggaaagttgaacttgagcaacttttgtctgtggttttgtgtgtgtgtgtgtctgtgtgtgtgtgtctgtgtttttcatccatggatcaaatactctcgggggggtgggggtgctggtagtgcagtccatttctggagctgaggcagggtagcaaaagctacatgcaacactgaaactattaatatggattgttaagtgatcttcagtagactcagtcaagtttagtatgtttgatgatattgttttcatgcagtatcttgtttgtattatgtgttttttgttttttaaaaaagaatatttaccttttatgtgtgtagatgttgttatttccatgcacatctgtgtactacatacatgccatgtcacgagaggccaggatcccttggtattagagatatagatagttgtgagctgccatgtggttgctgggaattgaacccaggggccctcaattgagtaaatgcttctataagcttgggctgccggcaaacctatagggtactttcttaattggtgattgatgagggaggactgagcccattgttggtgatgccatctctgggctgggtcatgggttctataagaaatcagatggagaaagccatggagaacaaagcaggaagcagcactcctttatggcttctgtatcagctcctgcctccaggttcctgccctgtttgtttcctgcccttacacctttgataatggaccatgatgtggaagtgtaagcgaataaaccttttcttctcaccttgtttttggttatgatgttccattatagtaatagtaaccctgactaggacgattcctatcacatcttcatattttctgtgtttcctggtgctacttccaagagaaatgacaaagacttgattcttcaccttagtatctcctttgtaagataagccaaagtatcatgttagccagctcatctcatgaccgtggctgatgagagaagaaggaagaactttccccctagtctacaggaccggtctaatgcatggcagaatggaatttagtgtcctcaattgaagtgacactcaacccactgtctcacactgtcctggggaccttgcaggatttcagagtgactacagttttcccttgtggcctggctcacacagaacatgactaatattaggaagtggggagggacccctttatagagttttctaattttgtccttcattttcagctaattattcatgccttggggggtaaaatagcttagtaggcaggacaatattagttttaattgtgagcttagtccagagggctgtgcttgagtgaaaaccatccaggagttggggaaagagcagatggttctatttctggctgctgagaggggctttgcagggctgtaaggaaagatgggcgtgttgattgcaggcacagggcacttcctgggatcacatccattatgccactgcttcctcactgatattaaaagaaattaaaagcacaggccagattcttaaagctaccatcaccaccaatcattgtggaaacaatcctaaaacagttgtaaatatctacttcattaagctacaacaacaataagaaaacccaacccaactcatcattggtgatgatttctaaaaagtcatctttggaaagagtaaacaaattagctgtgtgctttggatctgtagggaaccctccccagcccctacctccatgttttgaccattgctgtccaggtggtgatgtggctttgtgaggccgaggaacacttgggaggccaagcatagctggtgcaggtaggtctctgggtctgggctttcagttctgtcgtgattgtctgaaaccatcagaaccatgaaccaaggtaaaatgttcttccttcaagttgtgtctgacaggtgtgctgatgaccacagttatgctaatgtagctaataaatggcttattattattattattattattattattatgtaggaatgctgaagaaggcctggtgtggtcattggatgctagaatccttctattcaaatgtagacagcaaaaggcctactaggaagggcaagtgctgggcctcctcagccttacaaccttcttttcctctcagcctctgctgctcttctttgcctgtaaatttccaagaacatttgtcatagatttaagtactttttctgtttcctctccaacaaaatatggaaggtgatttcagaagagtggaggccattgcatgggtctcggtgacctttacaacccagacaggatgtgggccagcagaggtacacagtttccaagggaaatttcgccctttgttttttgagattaataactgggtgggatagaaagccaaatgacttcattgttgagcatagacttccaggtcatgagatattgcccgtgtgaactaaactttggcaaggtgtggtagactgatgtgcgtgcacacctcaataatttcagaaatggagcagaagatacagggacatgccattctccatgtgatttgctttgccatttaattttatttaaatgctgaggcccaagcctagggcctgtgtattccagggaagcattcagccactgagccaatcccttgatattaatacatactttaaaaagcacatcaagggggctggtgagatggctcagtgggtaagaacacccgactgctcttccgaaggtccgaagttcaaatcccagcaatcacatggtggttcacaaccatccataatgagatctgactccctcttctggtgtgtctgaagacagctacagtgtacttataataaaaataaataaatctttaaaaaaaaaagcacgtcaaggaaagagctacttccgtcctttctctactaatagcactccgtggcagaatgggactgcctagatctttttgaagtccatctcttcatgtctgtttggatagagggtttcttatcacaagatctagctagcagttttaattataaatgacaagggcagatttagtttgaagttgatagagggagagtctattatctctgaacaagtacgaactaaggtggttgaaggttgacttggcaaggtgacttccctttctctgtcaagttactgtttgcttgcattaccacagggtctccagtctcttaccagacagcttccaaggccttcctaactcatcttgtgtgaacttaggtgtagggtagaggtgacttcaggcgggtagagatgcagtcttcgttggactctacccatcagcatcatttctctgtgtaaagaagtatggggaagagtgaagggataagactgtttcttcctctaaggattaaggtctcattaggagagctgatgacgcaggcatggacatgtaaagtgatttgtagtaagcaaggaattaagtcctgtctaaattccaaaggagtggacagagtgctacactgctaagggagaggctttctttaaagactccgtgaaagctaataccatttgggcacaagtggtacacacgtgtaatcctgtctcctcaggaggccgagtcagcctgattcttaattcaggctgtctgaggcttcagggacttcaaccccagcctgggaaaatttggccatgtctcaaactcgaattcaaacaaactcttccagagcctgtgtggcatataggaggcccagagttgaaccatcagtggcacctacatgttggcctcaaggaaagacgtgggggttgatgggaatccggatctgagggaaaatgctccaggtttgaggggctgacttgttagggccgacacagagaccacaggttttgagcatcgttcagaggtgcagaattaatttcaaggtcaggggcatgtgtgggtgtgggtgtgggtggatggcgtggtgctcatgagagagctggaaggggaagttggggaggacttccctcctgaggctggaagtctgggcatgattatcctggctccagtgagtgattaaaatgagtgatggcaaagctccctgcatggattttaatatttaagattctgctgccaaaggctgagctcactgctcttcagagtgtgactgtgaccaagggatgaagtgcccccctgttgggtcagcaccatctaggctgaatcccagctaacacctgctgaaggcacttcccatggacatctgcttctcccttctgtcctctagcaaaaggtaaaaggagccttggaggggtgcggctgtcacatttctgtcttccaggtctgcacctatggaatcatcctgtggattatgtgtggagacccagagcttgtaattaagccctgctgggctcgaagctctggctctctgaaggctcctgctgctttctgcttctgcttgagacctgctctctctctctctctctctctctctctctctctctctctccctcccccctctctgtgtgaatgtgtgtgtgtgtgtgtgtgtggtggcggcggctgtgtcagttcccatgtcagttccctcttgctgccagacgtgtcccattaatgctgattttccagcctagcagtcctttaatctttcagttgtggggttctgttgtggatctcattgggataaaatgaagatattggtgggctctgcccttcttgaaagtaccagggatgagtccgtttccttttcctgtccaacaggctgcttcattccttggctcatggtcaatggcactctcaaaagcagcagttataggtcaggttctaatacattgctgacgccaattctctcctgccttcctcttatgcatataaagagccgtgtggtgacgttgggcatactggaataagccaaaatgattgccctgttccaaaatcagctgattgtcccaaatgaacacatgctgctccatgtctcacactatgcttcaggtagtgaaatgctgtcaccatcaggatctcactatcagtacatgaaggtcttttgtggggagactggaccaggtagttatattgttttgtcttccatagtgggaacttctgatcatttctttgtcacaagaatgtaagcacaaagaatttaagatggacgctcattcctcattttgtcctgtatgtctgggtttagtgtcagcatgcctttttagcaatcaatttgttgttgttgctgctgctgctactattttaaaacaacagcacagagagttgttcttaaaagtttttgtgtatgctgggcgtggtggcacactcctttaatcccagcactcgggaggcagaggcaggcggatttctgagttcgaggccagcctggtctacaaagtgagttccagggcagccagggctatacagagaaaccctgtctcgaaaaacaaaaagcaaaaaagtttttgtgtgtatcaggatgtctgtttgtctggtgatgggggaagggaaggaccatctcaagttgttttaacattagggacagcaggatgctggcatctgcacacattatagatgtgggttattaactctactgtgacagaaaccagagaacgtccttgccatctacttagtctactatcttctgaagctacacgttacagtggctgtgactcagtagctttctctcagtgctgttggctctgagagcatccgacagtgttcaagagtgtttgggaagaaaacaagtgaacagctaagcaaacagtggaactcaagtgattccaaattcaggggaagtgcagaagttcagaggttagatagcaagcattaaaaaaatgaaccgtatgcttagtgggaatctcatctctggaatggattcacttaaaacacattttaaagattaatttatgtttattttatgtgtatgaatgttttcctgagtatatgtgtgcctgtgtaccatatatacacagtgcctgcagaggccaagacattggatttcctggaactggagttcatatggttgtgagctgtcatgtgggatgggatcagaacctgggtcctctgcatgagcagccactgctcttaaccatgagccatctctccattctcgcaaatgtattttcggtaaattgtctttcttgtggcagagggtacagattttatgtgtattacaatttccttctgacccaataactcagatggtattatcgccatatgaatataaaaaaagaaaatggtgtcttaaagtgatatgtggttcagccaggcatggtggtgtacacctgtaatttcagcacttggaaggctgaggcaggaagattgctacatttttgaggtcagctcaggctatatactgatttataggccagccagaaccacagagagagtctttctctttgaaaagtctaccctgtcaatcaaaaccttgataaaattaaaatagcagggcttgtggacaacattgaaaatatgaatatacctgttcatggcaccacaggaagtcaacatacatgtttaagatgagagcatctgtgaaccagagatttgttctgaaaatacctctcagacataataatcactttggtctgccacttttttgttagttgtttgttttttttttgtttttttggtttgtttgtttgttttttcaagacagggtttctgtatgttatagccctgcctgtcctgtgagtgtttgaagaccagctggcctcgaactcagagagatcagcttgcctctcctcccgtgtgctgggattaaaggtatgcaccaccatgtctgactttttgttagttttatagatatgaattaaattctgtggagaaaacaattttctttacccacccccccccgtcatcagagataacacattgttaaatagtttaattagtttagaatgtactatcctgtgctcgcttcggcagcacatatactaaaattggaacgatacagagaagattagaatgtactatcctaaaatttagaatcctgatattttgaatgctttttggaaaacacatatttctggaagactcgggtttctggaagtacagtatccggtagacagataggtatcctggcagtgtgataatgccctatttcaggtacctaaatcttttatgttcaaatggataaatcctcccagcttctgtttttcaaggaaaatatttccttcaagaaaataacttatttgttgggccaaagccaggaggagaggtaagaatgaaaaggcccccgtaatatgcttccttttcttgacataggaaaggctttgcatggtgttttatggaaaaagaagcatcaacattaattcctacaaatagtatatttaaccaacgataaaattatttctgtgtcaggcaaagaatcactgagcagggtcccaaagaagacccagggctgcttgcctgattttgaaggggtcgctctgggtttgccgtcttaggtatttgatttatttactttttttgtttttgtttgtttgtttgtttgtttcttttttctttctttcttttgttttttgtttttttttctgagacagggtttctctgtatagccctggctgtcctggaactcactctgtagaccaggctggcctcaaactcagaaatccgcctgcctctgcctcccaagtgctgggattaaaggcgggcaccaccacgcccggcttgatttattttttaatttctagtttggcctttcacaactgagaggttcgaggacccagtggtgacttagagcacggcttgtaatgtcccatgtagttggtgtctatgttgcctctccctctccctccaccttctttttagatttgatctctggaagctcaggcttgctcctgacttgggggaaggccttgaacttcttatcgtcttgtttcttcctggagagttttgggcttacaggcttgtaccacccgcacccgcgtccccaaacccatcctgtttggtgctggagatagaccccagagctttgtgtgtgctgggcaagtacatccactgccttcagaaatactacctataatactgtattacttctatggttttataagggtttttgttttcattttgtcttttttgttttatctttttgccttacctaaaaaaaattttttaacacagtaccagtagtttgaatatattctttttaaaacctttgaagattttttttgtttgtttgtttgtttgtttttttcttttttttttggtggtgggggttgacgcttcaagcagtctaggctggtcttgaactgtctgctgaggggaaaaccttgaattccagattctctcgactccgccttcacttattaggattataaaaaaacaggagctaccacatctagctcatgttataaaaatgatttcaatgattaaatctaattaattttattttttttctgctgagatacaccataattgaatatctgaaggggctacaagtgcatttcaagtctatccatccgtatccctagcacctttgtactttgctgatttgggcagagtgagcgtaatgttacagccagagtcaaagggcttacggatgagctctgctgtgcagtgtagctggaggctggactcagagggagctcctgtgacctctgagttgctgaggcctctttgttctctcgccccagtgagtgcctgggtgggactgggggaggcagacatttaaaagaaggggtgagtgttgactaagaaatcaggcttcgcctcccagaacacccactgtgactctgtgcaatgtttgactctcagcaaaaataccacttgtattctgaggccttttgtttcaacgacataactcaacaaccaaaacagcaagtttcctacaattgaaaagaacagaggccacgtagaggccaagttttgccttctaaggctaaatgcacttggttttaatctcttcttcctcaagagaagagccaggagactggccctctggtatttctaggcacggcttcagtaatatggtttctttctaagtaaggacttttgaatcctccttgttttattacttctattgctccactatggaagaagggcaggctgggacagtttactatccgtcagtgtcccgtatcccgcttccaggagccctctttctcttctgaggctgctcatgttgtctgtgggaagctggatcatatttgtcgataaaccctgcgcatatcacttgtatagcccactgcaatgtgaatgctatgcaaatatttgtttagggaggaaggacaagaaagagtgcttgtacatattcagtcagacacaagattttctgaccactttggacatgcagctggttgattctgaagatgtggaagtctcagattgggaggactgactgtgtcttccactcgtgatggaagctgaggacctggactgaggtgtatgctgcacctcttgtcagctgcacctcttgattgttgtaaggagtaaaagaagacaatctaaatgaaaagacattgtgtagaaaaacaaacacttgcacattacatctgattaaagtctagaatgcaatatataaagatttattggacagccacaggcacaacgcaagcaaacacaactgtggagtgggcaaaggaatagctgtctctctaaggaagatacacagatggccagttggcccaggaaaaggtgatcagtagcattatggacatcgaaattcaaaccacagggattccactttgtacatactagggtgggtgtgattgaaaaacaaacaaacaacccctaaacgtggcagagaacaggacttgaaaaggctgagaagtgttaggcttaccctgctggtggaaatgcactatgctcttggagttttctgtcagctcctaagagagttagttaggtgtcaagttaccacataacagcaatttctgtatgagttatgcatttaaaggagaagaaaccctaaggccacctcgaaaataatacacagatgcctgaaacagctacccatcataagtagtagtagtagtagtagtagtagtagtagtagtagtagtagtagtagtagaaactactaaaattggcctggcagctgatgaactgccaataaatcaatataatcaataaaagatggcacagagtttgctcacaaggagacatgaggtcctggcgagggccatgctatgcatggttgttgaaagaatactgctaggtggaagaagcctgcagaagcagccacacatcatcacactctatgggatgacgtctctctactgggcaagtgcacagggatagaaaggagattagtgttgatgttctcaggggacaggtagggcagggaatccagggatgacagctcatgagtatggaggcggggggtgggatgggtggggggaggttcttttaggaataatgaaataacatgtctgacacgagtggtaattatggcacaactttgttgaatgtacagaaacactagcacgttaacgcctctgtgtgtgtgtgtgtgtatgtttaaagaattatctacttaacgtatataaatatactgttgctgtcttcagacacaccagaagagggcattggatcgcattacagatggttgtgagccaccatgtggttgctgggaattgaactcaggacctcagaaagagcagtgagtgctcttaaccactgagccatctctccagctgcctgtgtgtgtgtttttaaaagtctgcatttatgagcgagtcctgagatgatgagatgagatgagatgagatgagatgagacgagatgagatgagatgagatgctgctgaattattgttggctaatgtgtttttcccatctgtacattctgcaacttcttactatttaagtaagataaaggacttctttgcaggtcatattccatgtagagatctttttcttttttgctctctttggtttgatttattagatggggcagttcaaaaagttgggatagtcccgtggaattcatctgacgtcatagaacttatgcatgcttccctttgggagaggggttgtggtgtgagacttgcgggagtgaggtacactgataaccacacctggggtctcttaccaggtacataacatgcatttcagacagacatcagttcttggtgatgtagatcagtggttgtaccctctgcaaaaagtgttgatgtatcttgaagccctgtgctcctgtctgaaccattcacagatgagacttgggggcatttcataattttcaggtttaagaagtgtttgtgctcatgtaaagtgtagtgttaataaatattgttggtaaataatattagactatttacttatggagtacgctatgaatctgaaattaatctggttcataacttccccctttgtaagttggctttgaaggatattctaacttcatcattagcagtaccaagattatgtcacagtctcctagtagctagacatcatggtgaccctctgagatctttgtttggctatgcaacctggttagatttgtctttgatttctgtgtgtctatacactctgtggtttttttgctggcctctgactcttcttatttccctttgaccttcagtagaactgtggctctgactctgtatgccccagtaggcgatcaacctggctggtgtgtgacttgctatggggggaggggtggcacacagtgtgtttcactcacatagagggaagcaaggtggcatgtttcctccactcttcctctgtgtctggtggctgcccgggacacctctcttctggtcagggcacagaataatttctgaaagtcaccacctttggcctgatagcttgaggtcatgctttctttctccaggtaaggtggccacgctttgagggatttactgtaggtttaatggggagattagtattcaaattgtgtttacttatacgagacttacaaatggttgttgctttgctctctggtctcattctgctttgaattttttgagacaggtgattgtgttcagaatatagcattttttttttttaaattgtagtgttcagaataagtcatttcagcaaacactgggaattcagctgttagagagctttgtatacaactgtagttgccttggttcaactctttgattaagattccactttaaaaaaaaaaaagatttccacttttagctgtgtctggtaccacagtggagtgataacaggactgaagtggtgaaggcaatggggtggatcaggagttcaaggtcaccctcagctgcatatgagccaccccgggctctgggataccctgtctccaaaccccaaataataaataaataaataaataaataaatttatttttctgaagaatttaccaaagtaaaagcagtcaaagcagtctagccttctaattttataacttggcttgtaaacataagttgttgttgttgttgttgttgttgttttttcccccttaaatatctttttaagctgaaagaggtttgtgcaacactcttggattttggtgtctgtagtgtgggaagttggaggtaagggtggtttctgtgtttttttcatcacaggaggtatggacggtttctgttctgggtggttgtattggtctggtaattgtggggcttctgcctgtgtgtggccccatagcccacagcatctactccctggagccacacatctctggttacagcaagcatagctgttcctggaagctggagaggcagggcaccaccatccagtgctgttttggcttgcccttattagtagtagttcttggttctcccactaactggcctctgatttcttcatcacagaatactcttcgcatgaatcaggatcctccctgcatttataaccactgggctttggaatgggagccgatgagtcatgcgatctctgagcaacggaatgagatgttcctacttagatcaatcagggtcgatgtcctcctctaatgggctttgagctgcttttctcgcttgccttcagggactatttttatacctgatttccttgcttggaatgttgctagaagtcagatttttatcttagtcaataatgagaaaggatcttcaaacacgtgaatggatgggatggcaaagagagtcagcaggtcatcttgatgtttgtgactcgaattatttgcacaagtatgaagacgtaatgtgtataactggttcatgctcttttttttttcctttgaagtgtacatattaacagttgatatgaaattttggtaaatgtagttcattgagacttacagaacacactaaataagcccattcagtaattttcgattggcaatctgtatcaggaactacaacttttatgttgaccagattacatatttcttgacctcctgaactcacctcaatgttatcaacataagtaagcattggtgtataagagggaagaaaacggggtgctttaagtgcttgggaggggggaggggggagtctagaatctgctttgaggaaaggtataaaatggcacctaaaaccttttttcgttcattcattaatttattttacatctccatcacagtccccctattctccaggtccccctctctcacagcccctccctccattccccctagagaagaaggggttccaacccaccctggcacatgcctgtggcatgtagaatgtccagagagggtgagaatggtgtgaagactcgagggaaggagaacagcacatgcgtagatatctggggcaggaagggctgggtctttacaggtggcacaaaggccggcgcttagagcaccctgagaagatggggcagggtggtcaattggtttgtagccttgtaaatgtgttaatttggtttttagaaattttactgttcagccagctgctctttagagagccagtctgagaggagaaagaatagaatttaggaaatagtgagagatggtgttggctataggttggaggaaagaaacgacaatatcttaggatgatggatgtataagttttatctcctgttgctgtgataaaatgtgcccccccaccgccaccccatgaaagccagaacagggaggatggaatttaagcatgcataattatgctcagttcattttgtgtgcttttacacagttcatggtcctagactagggaatagtaatgcccacattgggtgggtcttctgacatcaattaatataatcaagataattccttgattagtcctcaggccaacctaagctaggcaatctcgcattgacactgccttttcaggtgattatagattgtgtcaagttgacaattaaaactaatcatcccaggaggttacagtggaggtgtgcattgatagactgtgctgaggagaaggaagccactgttacagatactgacaggtccaggcaggaataattgaatgagtgaaggtggaccagtggatttgagagaacatcagtcttcattcaatgtgttaatgctgatacaagtctatgctgtatttctgtggcagtgtcaggaagatgcttggtccatatatgaacccttccatactctaaagactctatgagttgtacaaaatagagccatagcagacaggttaacaggagaacacatgcataaatgtattatgtacacatgcacatgacagcaacacaaactataagatgggaaaaatgcctgaggttttcacttgcacaggacctgtgtgtgaattcccagggctccgttgtctcctgcctgtaatttcagaactaagggatgaacgcccatgagactgaggccattctgaactacacagtgagttccaatctaaactgggctaaaaacaaaacatactctctctctttctctctctctctctacacacacacacacacacacacacacacacacacacacacatgtatgtgcacatacgagaaatagctaggtagggcaagtgataaatacattaatttccaggctacaaaatatgaatagtgcttaaaaatgctatcattaaagaatacatctaaaataataaatttattcataatatattttaaataaaggttatatttgctatctgtcttcattttttgtgaaaaacaaaacaaaacaaaacaaaacaaaacaaaacaaaaaccaagtgggcaagaatgtctagaaagctgtgtaaatatgtcaatatttcacttcctccttcaggggagagaaagtagtttacattttcattttgtttgggtaaatcttcataaatatggttagttgtacagtataggtaattttgcaaatcaaaaatgaaatgataatactaatctttaaaatttggtggaggaagttatacagtataagacttggctctcgactttggagccaccaagccagctgatacactagcaacattgtgccataggaaagctgctctctgatgcctctgaatagcttacttaactgcacccagtctgagaaggagtgacatccactgtcccccaagcagtttcagcagggagtggcttaggaagacaagtacgctaatcatttggggtaacagtgtggcagcttggtgcattcacaaagacctgatttgcacatgtctacttgactgggctccacctaactcaggcctgagggttaaggaatctgcattttaagaaaattcttcatgccgggtggtggtgcacacctttaattctagcacttgggcggcagaggcaggcggatttctgagttcgaggccagcctggactacagagtgtacagagtgagttccaggacagccagggctacacagagaaaccctgtctggaaactccgccccccccccccccaaagaagattcttcatctaatacaggtgttcaaagagcgtgggaatctgcagtacattgtcctttatcagatgatgacagattttatttataattaacccttgtgtgcatgtagatgcagattatagtagcatttactcttgtagccatttactggcctttttctttcccttctttacagcaggaatatcaaagcaggtagtttaaagcatgcaggtttgtccaccttttggtattgtgatacattgtagcctacaaagttcatgctggagaaatatacagtccttatcaaaaagaagaaggaggaggaggagagggaggaggaagaaaaaaggaagaaaggaaggaaggcaaaaggaaagaaagaaatagaagagcaaagagtctcgctatattttaagtgagtttaccattttgggtttggccccaattttacatgcatccaagactatcaaaacacagttcctggggctggagaaatggctcagctcttgcaggattcagttctcagcacccatgtggtagctgacaatcatctataactccagttccctgggatcggatgccctcttctgacctccttgggctccatgcatgcgcattgtgcacatacatacatacatacatacatacatacatacaggcaaaacattcatacacataaaataaacttaatctaaaataattaaacaaagaaataaatacacagtccctgaacctggcaggatggctcagtcattaagaacatttgctttgaagttatgagggatggaagttcagattataactccaaggtaactctcctggcttccatgcacacataagtgcatatactcacacagaaacaaacaagcacacaagcacacccacaaatatttagataaaaataagcccttaaaaacccaattcttaaagtaggaatatgggttctttgttaagggctattgaaggtaaggtggggatgggtttgaagtgaacacaccagaatctggcaagtaaactgttagtaaatgttagttttagtatgagaacacacgatttgtggctcgagcccatgacttcctaatcaattaattcatctcattatttcagtttccagtcttttcggtatttcttcaatcaatgtcacatggcctgttacatttcgttcttattaatgtcaattttagagagggagagtgttctcatttcatcttgtactccaggagtattcctgaaattcttcccttagattgacctcagtggcattataactgaatttaatggggagtaggaaagtttctctgggttttgtgaagaggaattttttttctcaagtcaactttatagatagaaaagtcagggctggtgacttgcttggggacctgactaagggggaagggcaaccaacagcaaggaggtcactgtcactctcggcaaggaaatagtagctttcatggattgtccactcagtgtgctcagtgcctggccagaaatgctgtgtagccatccctgtttgtaagagcaggtgggtgtcttagccattcaccttactggagggacaaaaccccagaattatcttgtaaataagaaggtggaaaggtgcctttaatcccagtacttgggaggcagaggcaggtggatttcagagtttgaggccagcctggtctacaaaagtgagttccaagacagccaggaacagagaaagcctgtctggaaaaaaaaaaaggtggaaaggttttgtgtgtgtgtatgttggtaaccagccccattcactacagtgaccttgaacagatatgttcctctttcacagtaaagccaattctgattctaaaatttaggttacccggtgctaatattcctaaggaacatattaaaccttggctgttgttgagcacaggttgaggaagaaggatcataagttcaaggatagcctgggctatagggtaagaccctgtctcaaagtgaaacaagagataggttgaaagtttggttggaaacaaaaagactctctttattgtttttttttttttttttttttaatttatttatttattatatgtaagtacactgtagctgtcttcagacactccagaagagggagtcagatcttgttacggatggttgttagccaccatgtggttgctgggatttgaactctggaccttcggaagagcagtcgggtgctctaacccactgagccatctcaccagcccatctctttactgttatgtggaggaatggttgcactagagcaccctgcagtctcctataaaattacacttcggtggccagagagatggcttcacagttaagagcatgtattgctcttgcacagggcctgagttcagttcttagtaccaacatctacttgcttgcaacttcctgtaactcccagttctgggggatctgacacctctggtcccctgcactcacgtacattacccctgccacaaatacctatattattcaatcaatgaacagagatcacactgagcggtgtctcacatctataatgcaattactcagggggctgtgctaggggcattatggggctacataatgggttctagattagcttgaactgctgagtaagattctgtctaaggaaccagaaacaaaaggcaaattaagactaatcacactgacatggcaatgaaaattgcttgtgcttttcaccattatataaaattttggtagcatgtatataatattcacagttttaactgtatattcatattgcaatgtgcaacaattacaatcatctttcccaaacttttttaatgttacaaagcttaaactctgtatcattgaacaattaatttctctctcacctctcccctcagcccctggaagctacagtatcgatttttatctctatgtgtgtgactgctttgatcgtggatttacagaacagctgtgctcatgtgacaggaacatgaaactcgttacaatgacccaagcgttcatccatgtgtaacatatctcataggatattgtttgtaaggactctgtaatagttcatgtcttgctaattaattctattgaagaacttttgtgttggtttgatccatttgctctcatgaatagtaagtaccttttgtgagcatgagggtataaagtccaagagtctgtttcagatcctgtgttttatttcttacactgttttgagtttgctggtgccgttgttgtttgagctttagcgactgggttgtattatgtaacccagtctgctgggcagccccttgtccaagccctagagtcatggtggttggttcactgtcatccagcagaaactgctaaatctcgattgaatgattaaacatccagatcttattgttaagggtcactcattcaaacaaggaaaaaatctttcattatgaattatagttgacacaatctgtgagatggaggaaggaaggaagagattatagtgttcccagaatgcactggctgttgcatagctttggagcagaaggacacacgtccttggcagctcatcaggaaggaagtgaagaaggaaactggacatttccactctttgaaaagccacattgctatgagcctggatgactgactgaggtcctgctctcgtgcctaaatgatttaacagtgagagtgttctgaaggaaaccccagccctagagagaatacatttgttgtctcctaagagcgatccaacgataaggcttctccagtctaagaaggtggaagtggaaatttgatagggttactggctataaggtcacatagttcagaaaggcaactgtactggctagttttctgtcaacttgacacagctggagttagcacagagaaaggagcttcagttgaggaaaggcctccatgagacccaactgtaaggcatttcctcaattagtgatcaagggggaaaggccccttgtgggtggtgccatctctggactggtagtcttgggttctataaaagagcaggctgagcaagccaggggaagcaagccagtaaagaacatccctccatggcctctgcatcagctcctgcttcctgacctgcttgagttccagtcctgacttccttggtgatgaacagcagtatggaagtgtaagctgaataaatcctttcctccccaacttgcttcttggtcatgatgtttgtgcaggaatagagaccctgactaagacagcaaccatgaaaagaaggtccttcttgtaggcttagatttttaaaaacctactttaataagggttcttaactggctcaacctcccttgtagcccaccactcactagagttggtggggaaagaaaggttaataggaaatggggtctgtggaccaatttagaaatagttctttggggctctttcagtcttggttgtcagctattagttgagcaccactctagggtcagcaacagcagttcaatcctgaagaaacctcagagctccaccaattggcaggagtccgaggaagctgcaagaagccactagagtatcttgaagttctttggagagttccttcgtatgaagccatgacaatcaaagattagcaactcaagaggctcctcccattgtctgcggtcatatttatatcctttgtaaacatcacaaatcctctcacatgtccgtttcaggaaaacatctctcacctgagtctgcttcagcaaaatatcccttcacctgtctgacccagcaaagcatcatatgacatagcggagtttcagaagcaaccagaaatttccaccttactttttaatcttcagctgtgaaacagagctgaactttttttttttttagatagggtttctctttatagccctggctgtcctggaactcacattgtagaccaggctggcctcgaactcagaaatctgcctgcctctgcctcccgagtgctggggttaaagttatgcggcaccaccgctggctacagctgaactttttgatgccttcaagaggcatgtgttgggaagaaaaagaaagagctagttcatgcagaagccagtaaataaaattgccattctctgtgatggtgtatacaattttcttccatgtgcaccagtgttgtgcctccttgtgtgtctgtgtaccatgtgaatgcctagtgcctttggagaccagaagagggcactggatccactagaggtggaattatagatagctgtgaactgccttgtgggtgctgggaataaaacccatgtcttctggaagagcagccactgctcttaacaactgagccacatctccagcctctataattttttttttaatttatttgtttagttttttgagacagggtcttataatgtagcacaggctagtctctttacttgcaacaatcctcctgtcttatcttctgtgtgctgggattagagacttaccacatttatggggtgttggggattgaacccagggcttcgtacatggtaggtaggcactatatcggctgaggtagatccctgagaactataatttttgatagtgatgtcaaggataatatattaatatcagcactctagcggaaagatttgagtttgaagtgggatcagagtttgcctgcactatgggtgtcatcttgtccttgccccgacctatcaggcatttccagaaataaaaaaaggttttattagctcatgggaatactttacatatcattttgtgccacctcaaagtgcagaggtctgtgctccctgggctaatttctcaagaaggttcattgaaagaaatcttttctcttgacttctggaagggcacacagcgtccttcctgacactttcccagcttcttagaaatatttatcttggacagaagattgcactttagtggacttgctgctttgaaattttaattattttaaattacttgaaaataatcatttttagtgattcttctcctcacgtggtgaacctgtggaggcctgaggagtctgtctttccacctctgtaaggttccagggatgaaactcaggtcatcagactggcaaacaaagtgactttaccctccaagccatcttaccaacccctcttcatttggttttaatttaaggctcaatataaaaaccttcacctagagaaaagaaaaaaaattctgaataccatttaaaaatttgaacgcatttgcagcaggtgacatgccattaaataaagcacaggaacaaatggcaaatgtgtcttgctttccctcaggtttgtcttgcttttctgaaagtgcttaaagtcttggtccatgacttgttcgtgatttctcttgtatattattattattattattattattattattatcattattatttatagtttctatctttataattgtcattttgtctgttggtacttgagggtttttttccccctgaaagttgtaagctgtgtagttttgtccccctcttgctcagtgtttctctactgagtcaacttggagatgtatggtttccatagctgcagttgttttatacctagttacatcaacagactggaaagtaatgcccactggaaaatcagatagaaatataagcagtttaatctggtgagtttctgtttaacaaatatatgagcttcactgtaaaacagagtcaggttcatttgcttctaactctccttttgacctctgcaggggacccttcttcttagctactgacacctaagcatctccctccagtcttgatcctgcctacctgtctgtaattacagatacagatggggcgccttattcttagaattcctatcagcatagacagtcagacctgccaggcaagttgtgtcttggtcaccaatctttctgcttccttacatgtcaaatgggaggtagaagaaaatgcacttttttataggacagacaacttgagatgctgtagtatgatttcttataacactgaaaaaatatagaaattaacacaaatgagtataagaatttcttagaatctctttagaaatacagtggtattttatttcttggttttgcagtcatgcatcgtatagtcatacgtacatataatgtttaagggaaaagctattcttcaagggtttggtctctattgcttccatatccccctttcttattccttttctcctcagccctgcagcctttcagaggtttatcatggatggctctgaatccatctatacctatacctatacctatacctatacctatacctatacctatacctatacctatacctatacctatacctatacctatacctatacctatacctatacctataccgcccccgcccccatttcactaaagtcaccttcaatcatgtcacatgcttgcacagtgaaagcacatgccttataccactctcatttcatctgtttgcattcattaggacttgcctgcggctcttcacctttttataaatgctctttctggccatttacatgcctcaaacaacaatgacgaaatatctttcctatataattctgaatatatatctacctaacatagtagttacaattgcctattgttttcaattcctgtcttatccttccttgtcaacaataatcatgctttctttttgtgcgtgtgtgtttgtgtgtgcacagtctaccaaagcacatgcatagagaagccataggatggcctgggtgccattacttaggagctgagaccttgagctttccagtcaatctggccaatcagccccaagttccaacctgcctctgtctctctcatgctgggatcccaagcctgtatcaccatgcttggattctttttaatgtgggttttgggagttgaactcagttcctcatcctttctgcacatgtacgttacttgagctatctgtcaagtccaaaaccactgccttcttgaaaatgctaatgatgcttgattttggaatcatgcatagtagacactcggtatagtggtttgaatggaaatactccccatagcctcaaatgcttgagtgattgattgccagttagtggaaccttttgggaaggatgagggggtgtggctttgttagagtaggttgagctttgaggtttctaaagcccaagtcaggcctagtgtctttctctctgcctgctgatcagtaaatgtcattatttggtcttttgtatagtgttttctataaattaggtatgaaactaactgccatttactgttactagccattgcaaagtttcttttgtttaatcatttactggggcagaagttctataaaaggacctaggctaaagtaatcatttacactgtaaaattttctgtttcttttggttgacaatattagctccaagtgcctgacaaggaggtgtatgagtatccatccatcttctagggattgaatggaggaaagttttagataaaatgttgccaccatcattggcattcacaagacagtcaatatccgcactgggctccttagctgtcaggccgccagttagcaggagcgataagccatttctctctgtccttctgaagggcaccaaggctttagttacagtgaatacaaagatattctagagctgagctgaccttcttcattgttgggtgcagggcacctgcagtgtggctgatccagattcagatggtgctggaaatgaaatacacattggatcacaaagtcttagtatgatgaatggtgttagatggcagtgcacagtaaagcattgagtatgtgctgaaatagcattttagatgtagtgggctaaataacaactgaacctggaaacagcacgtatactaaaatgagctttacttttttttttttttttctttttaagtgtggctagtagagattttaaaagtttatatgtcagggtaggtctaaggtgcagggttatcgttcctgctacttcttcagctgaggctggagaatcgtagcctatggtagactgtaaatccaagaccagtctgcacaactagtgagacactatctcaaaacaaaaaacaaaacaaaaacaaacaaacaaacaaacaaaaaacagtataaaaggggctggagagatgactcagcggttaagagcactgactgctcttctgaaggtcctgagttcaaatcccagcaaccacatggtggctcacaaccatccgaaatgagatctgatgcttcttttgtggtgtctgaagtcagctacagtgtatttacatatatataaaataaataaataaatctttttaaaaaaagtataaaaactgggctggtgtgggtggatggagagaaggctgagtggttgagaacactgaccacactggccacttttgcaaaggacccaggtacagttcctagcacccacatgtcagctcacagctggctataacttcaattctaggggtctgacaccctcacacagaaatacaagcattcataataccaatgcactaaaaaccaatttaataaacaaaaccaaacccaatcagggctggggattcagcttcttgatatgtgtcctggtcttgactatctgatgaggtttcatgttaaatctctaacatcttcaaaaaaaaaaaaaaaaagaaagaaaaccaaaacaaagccataaattctataatgttactaatatgacatttctctagacagcacaatttttgcaataggatttggggtcatgttgtaattggcatcagatggctagaacctatctagctaatggctgacaggaccctcatggatttagcatctagactgaaggaattgttttctgtttaactgataatatgggatgtctagggaatatattcatcattcatcagtttattctagatgggaacaacggagacaccctgaagtctttcaggcttctgtggccatgaaccctctcctggttaagcccaaggctgcatcttaggtgctttccttttgtttatccacctttcattgtcacctttcctgttgctgaaagaagagcgtaccttccagcattcctaactcatgtagtggttcacttctcccaggcacttagtataagcagaattcagttacaccctggataaggctttgtacccagtcaccattccatccacattttgatctgtccatccacctatctacccaaccatccacctactcatccatccgtccgtccgtccgtccgtccgtccatccatccatccatccacccacccacccattttcccacatgtccactcattcatgcactgagtcacccacccatccacctatccatccatccacctatccattcatccgtctatccttccatccacctacccacctatttatcccggatagaggattctgaagtgagatattcctctgaagatatatatcagtgtgattttttttttttaaagatttatttattgattatatgcaagtacactgtagctgtcctcagacactccagaagagagatcttgttacggatggttgtgagccaccatgtggttgctgggatttgaactcctgaccttcggaagagcagttgggtgctcttacccactgagccatctcaccagccctcagtgtgatttttaaatagaaaactcaagtctgccttctcttgccagagatttaaatgtgatgtgcctggttggtctgacagggaggagaagtctcagcagttagggaacagagaagtcatcctcttattatttaaggagaaaaaaccttgcagctagaaattacatatttttgcctatttaaattcatgataaatattagctgtcaacttaaacatttgagaattccttgggcttcttgaagatgaacctttgacttaaagtaatagacgtgatgttgtgagtttcgtggctgagatctcctaattatatggtaggcattatatagggatgttaagataaaagatgtgaaatgtacacatatacacacacactcacacacacacacacacacacacacacactagataaatgtaaaacaaagatgaaaaatgttttatatatcagctatatagaaaaataatattgctatttacaaatggaacaagatgtttgttactggcagtattgttccctattttattttatttatttatttctttttggtcgaacacacttttaatcccagcacttggaggtagaggcacgtggatctttgtgagttcaagaccagcctggtctacagagtgagttctagccagggtgttaccaagagaaaccctaactcaggcagaaaatattttattaagatttttcaagacagggaaaatatttgtatatttttagacagagcctctttaggtggtccagtctggccttaagcttaccctcatctgcatattccttcctagtgatggaattaccggcttggatggccaagacggagcctccaagcttttgtgagtattgcaaaattttcgaaaaaaaatgtattgtgatttttttaaatttatgagggatttaaagaatcccttacaatatggggaaactaatagaataaatgaattggaatgagactgatctatgatgactgagtcttgtaaggatatatttctgttgttgacaagcagaactcatgccaaggctgacagatcactgcagtgttgtccaggtttagttttttaaaacagtttccatacatctcaaattatttgtagatgaaaacagatactctgccttgagatttcctagttagtaagagcaacagtaacaggagggatccaattgtataggaatttttcttcatgagtcaatttaatctcttgatagtcattttaaaaagtcagtgaccccactgctctcttcctgagtaacctccttctattccgtgctatcacaattgattaaaacaaggctcataacaatctggagggaagcatttgtaagcgtggtggagctgcccctcccaccagagtctttgttctggtatgtttgcaacacgtgtactgtgcttgatatttcccacgtggcaaactttctccttcagcatcagaggctgttcctaggttcctggggccacgcgaattctaggtgagccctctacctgtgagtaagctgaatctccacccccaaggcttaaggctttaagaattgatttctttccaaaaacacacctctagagagagggtttaaggcagtgtcaggcccctctaaatctcacacagtctttcaagataagcttagggagttccaggaagtaaaacaggaaagggacagttttgtgtttctcattgccctgacacccaacaaactcagcatttcagcagtcagtttggatcattctcaaggctaccctttccatatcaaggtgttttcctttttttttttttcttctttttgttctttgaaagtatgctcagtattaaaggactctgcttgggggagttccttgtctaggaaaagattgcatgttacagattattagatgatacctactatttctgtatgatattttaaatgcatagtctgtgaatgaatgacttgatttcatttagacagcacagaagacatcagagtagaaggcgcgtccgtgtctcatcatggtgtgttaagggtcactcatgggaagagcccagagaatgagggaatgggctgtaggctgagcattcttgttgcttctgtaattactgtcatgttctaggatgtgttaaatctgtgaatgaggctttaatttataaagcagatccgaggtctaaagcctccagccacacattccttatagtccacatttcttttctgaattctcaaattttgtggagttcaggttagggtgagctggttgaccactattaaattgcttcaaaatatgttaggaggatgctgctttccttttaagcccttttatcagggcttgtctgtctgtaatagatacagaggtgtatgtatgttatatatttttgtgtgtgcacatatttgtgatgcagagttaatgttcagtgtcttcttcaaccactatctattttttcggagctggggtcttttactggatccagaatttacctaattcacctagatcagggttctcaacctcacgttgtggtgacccaccaaccataaaatcatttttattgctacttcatgtaattttgctactgttatgaatcataatgtaaatgtctgctatgcactatggtcttaggtcacctctgtgaaagtcgtttgacccacagagggatcacaacctgttgagaaccactaagttagactgtctggctgcaaggcgctgggacccatcccacctctgcttccccaggacagggattaccggcacgtactaccatgccttatttttcacacgtgttctgaggatctgaacttgggtctgtattcttttttggccagcactggacctactgaccatctccctttcccctcatggcaaaggtctattaaaagatatttatttcattatacattttagcgggcgaactgaagtcattttaaaccccatagtctcattggtgtttcctgttttacagattacagcaataaaattctaggccaggcagcatcgctggcccttggatttgtatgagcatgtcaggagtatttaagaagagcaaaatatttagaagaatttggaaaagcagccttaaggggtttaacacatttttcttctcctaattcaaccccgtgcttttttccctaatggagagaggtcattgatgatgagatttgctaagacagcaaaggctcttagaagggaattctaaaattcctgtctaatgaatacattgctttcagtttgggaccctgaaagaatacacattgaggaggtagatcagctgcatgcattgttcttactatttcagtctgtatgtgatcagcttaataagatgaggggttatattgtatgtttctaaattttttttgggggggggtcaggaattaaaccaatcaattggtctgtttgatgagaattgtaatagaaactgtttgaatctttttctaagcattgttttattttttttattttgtgtgtgtttatgtgtgtgtgtctgcatgtgtgtgtgtgtgtgtgtgtgtgtgtgtgtgtgtatgtgtgtgtgtatatgccatgtgaatgcaggtgcctatgaaggccagaagagggtgttggatgctttgaagctagagttacaggtggctttgagctgcccaatgtgggtgctgggaactgaacctaggtgttctagaagaacagaaagtactcttaattgctgagccatctctccagtcccctatttttcctaatatttgcatttctttattttgtgaatatgtgtgtgcgcacatgtgccatggtgtgtatacagggattttcagggctctgttttctcctttcaccatgtagtagttccaaggaatcagagcagacgaccatgctgggcagtgagcatcttcacctgttgaggcatcttcccagacttagcctgagactattgaagttctttgatctttttctgtggaactggagttgatcctggatcctgaggcacgctaggccatcactctactgtgggctacaaccccagtgaggctcttcaagctctgtgtcattttataggaagttgaagggtaaatgataacagcatggcagattttcagttgtttctgagttaccaatgaggacatggagagcagttactctactaacaatggcttctcattcttttttttttccttagaaagtattttatttttaattgtgtgtgtgtgcatgtgtgtgtacaggaataaaagtgttcaaggacccccaaagcccctggccccttgatttggaggcagttttgagctgtccagcccaggtgctaggagcacatcttgtgttccttgggagctcccttcctggctgttcacattttttatattttccatgactgaaaagcctttcctttactgaaaatttgtagatcatggggttagagaggagaggaggggagaatgggcaaaggagtgggcagtctatagatgtgttgaatacaaatctttcaagttgtttaggggaaataaatacaaaagagtatctgtacattttggaatatttttgaatgcctggatgttatctttgatggccaaacactccatttcatgttgggcaccgagatatagatatgtgttgatttgactaaaaagttctaggctatgttaggggaaacactgctttgttcttataaacatctctttatgtgggactttattttcaaattttatgttattctacagtagatggcatagaaaggtaaattggtagttactcctttctgtggtcaacctacagagaaaactctgtacatcattagatactttaattactccccagcacctcacccttctggggattggaggcagagctttgggtgtgtgcacattcactactgctgggctatatcatgagacttaatatgatcatgaaagttgaaacttttgaaatatgtttaaaaataaaatattgttatatttctgtgaatattttccatttttcttatctttattgtaaaggattttgttttgttttgttttgtttgttattgttttaatgagtcaggatttgtcttggctgtcctggaattctttctgtagaccaggggatatcattgactcagagattcacctgcctttgcttcctgagtgctaggattaaggctgcatgccaccactgcttagcgttaaagaactcttaaattgtctgaacattatgaaagtaagagaatatttatttgtgaactttctatttcttcttcataagattaaaggatggtgggtacaacacaatttacaaaagtaaacctcctttagagtcatggaacatattattatgttaagtgtttcaaacacagatgtttaaaattaaattcttttcagccaagctggtatagtgactgtttataggtagatgtacctagtatagccttgcacgctggctgtattgtcagctctgtccttctgaagtttgatggtaaaggctgggacattctgtgtatgtaagcaagtctccttgattaatgactttgtagcatcgatcagataatgtataaagctggaattggggctgatgactttcttccctgtcctttctgagatgcaggtcacctttcagcaccattaacatcaagaatcttcttagtgtccttctatactgtcccctttgagccttagggttgctctccaatttcctttatggatctgcaaactctctttctagaactgttatatttatcacagggatggcctttcagttacaaattttccttctgtcttagttacttttctattggctgtggcaaaacattgtgaccaaagcaacttataaaagaagacattaatttggaacttagttctagatggttagaatccatgaccatcatggctggtaccatggtggcaaataggcaggcatggtgctggaataccttacattcccatctactgactggaagcagagagagctacctgagtgttgcaggattttccctgtccaattacattagggtaacaggaggcctgtgattggacagagaaaagggaggcagagctaagagttgcagggacagagagtgtagagagtgagaaggagaaagaaaaatggaggcagacatgaaccagtgtacctttaaccaaccacaaatagttatgatatcagaaagttagaacaattggaataaagcttttatcattatcaattggttctgaaatgattgtattagcatcttgttaattgagaatttattgatgcataaatctgattggttatttataagctttaagagtttctattctaccaggtaaatgggttttgtattagctgactgtggggtgggtggttgttgcatgccaatgagaggaacttgggaactccagccccaccagaaaattggcaggtagagacagagccagcagggccaagagttaccagcacatgtgcgggaacgtgctggtacctttttaaaatatttcttgcaacacttgagaatggcatgagcttttgaaaccaaaagactgcccccccccctagtgacattcctccagcaaagctacccctctgagtccttctcaaacagttccactaactgtagaccaagtattcaaacatgtgaccctatggggaccattttcatccaaatctgcacactttccataagctattagaacacgaatttatcacaaacttgatgttttagccaatcatctatatgaacaatggagtaaccaagataaagttaaagaacaaaaccaacttgagaggaaagatttatttggcttacatattctgagtcatagtctagttaggaaagccaaggcaggaactcaaggtaggaacctatgctacttattggcttgttcagtttgctttcttatatattccataactacctccctggtgtggtactatctacaatgggccaggccttcccacgttgattattaagaaaatgtcctatagacttgcctataggttaatctggtggaggcattttctcaattgaggtttctcttcccagataactgtagcttgtgtccaattgacaaaaaagatcaaccaggacagatagttgacttatagaagaaaaagtttatgttggcttatagatctgaagatcagagttgatgactgaatagacctttagtttctgtaccatgtggcaatagccaggaatgggtggcagagaaaatgggtggagagccaagggaggacgaagagaaagtagggggacctcttatccccttcatagacattctgccagtgacttaagtacttcaacaaggttcccctattgaggtttccacctttcccagtgcatccaaaggggacgaaagccttttaatacatggtcctttgaaggggaccttctttttccaaactataatactagatgtagtcagtcttatttattagtgagatgttcctctttaccaaatacaggcagtccctttgtggtgtgtgcttggctggcagaacacacaggtctcttcctgtgatgatgttgcctagaagtgtgctgtagtaggtgaggcacttagatggacccatggctttatggactattctgaatatagactgctttcagaactactcacaggtagttaagatattactttgtaggtgttcaaccaacaatgacttctgttagttttaatagaaaagtggagagtgcttgaatcatataatgggaaatgataaaactggactgttgttttcctgtttgttcatagttatgccatcattttgacaaccaaaaactaaatgccaggtaccttatttacttttctactgctttgacaaagcactgtgacccaggcaacctataagaagaagcatttgatttgaggctcatagtattagagggttagagtccatggtcatcatgatagggaacatgggtcagacagcaggtatgattgctagaagagtagctgagagcttatatctgacccacaagctcaaggcagagagaacgctaactgggggtggtataggctttgaaaccttaaatcccacccccagttacacacctcttctaacaaggccacacctcctaatccttcccaaactgttccaccaattagagaccaagtgttcaaatatatgagcctgtgggagctattcttattcaaaccaccacatcaagtctttgcggaaaagtttcacttgtcagcataacaatatatcttacaatatagttaatatttatttccatcttgcagatgaggactttgggggtggatgactcttctggttcttaactcagaatcccatgagaagtggatcagaatgtgatctatttggccctaatacacattgcttttgctgttggtgctattgtaccatgtagtctccttacatacttcatttacttggctcattttcaagcaatttgaggttcttcagatgtttggtgctagttgtgccttgcccaatggatttgtaattgagccagagttgataatgtttttaaattcttctggtttatatgctcattaaaatgtttgtttaagagggctggagtggctaagaccacatactgttcttgaagaatggctggagttcagtttctagcacctgcatggtggctgtaacctcttgtaacttcagcttcagaggatccgatgccctcttctggactccgtgggtgtttgcactcgcatgcatatacccacacatagacacatatatacacatgattaaacatggtaaattaaatattaaactgtacttaaagtttaaagccactgtgactctgttgctccccccattttgtcaagaaaatgtgttggataactgactagaaatcttatattccccccctttttttttctagaaggggtaggacttgtgtgaagaaggagtagctatggagtcttaagtttctgttgagtaactttttggtgggatgtgttggtctagcttcattacctgaaaggatctttttgaccctgaaagggtccattgtcatggggattcaggcaggagccttaagcacttgcacgtgtccacagtcaagagcaaagggagaattcgtgcacaaatccctactgttcagcttgctgtctccagtttcctatagtctaggattctaagtgggatgctgccattcccctgaggagcaggtcttcccatatcaactagcacaatcaagacagttcatcacacacattcccataagccagctggttctatagactccctgatgcagacatacttcccagatgatcctagattctgtcacactgaaaattaaaactatcacacatatttatcatgtttgatagtatacttaaaatgtaattgaaagtgttacatgtaaggtaacatctatagtgtagcacacaaacgtggatttcataccaggactcttgggtgagatgactgagtctcactttactgtagaagttggtggtccccatcagtgggttcattaatagctatgtgtcccttgcctcgtgctgtatacatgtcaatcttaagctgccaagggaggagatggttgtatttattacactcaccatcagtacaaacattcatcctgttcttgtcttttctttctctcccgcagatgaacacaatgatgtacagaagaaaacctttaccaaatggataaacgctcgattttccaaggtatccaagatgctggtggattttactgtgtggtcagtgcctccttctgactttagcatagctaaaaaagatgaccagttcctttagcatggttaaccatgaaaactcaggcatcctttctgccctgtgcaacagtgataggcttttcctcctgtgagtatggctaatagcattatccatcctctctctcctttacttgtctgctctttatcagcatctgcaaccagtggaacataatcattgctatgctcagaattgggggagagggagggagaggtgtggagtatggtaaaatgaggggtttcacattggctttaaatgtgaaatagttatagaaggtaggaatcccccacccccaccccttccaagtcttatatgggaacagcctttgggttgattgactctaagacaggaacttgaagaagaaaggtttctttggttatctttaaactagtctggaagatccctttaaagagattggtttattttattttagatgtattgcctacttgtatgtatgtgcacagttttcatgaaggcaacctcagaggtcagaggagggcatcgggtcccctagaattggagttatagatggttgtgagccataacctgggtgcttcaactgaactgggccctctgctagagcagccagtgctcttgtgtgggtggtaatctttccagtctcttggaagctcttttagtcgaaagttctgtgtttacaagttgtaaagtcagggccaccgacactggtgtttcctggagggaaggagaggctgacttacggtgactttaaatagtgacacatttcacagttgccccatgtctcacaggtcaggtacagtggcacatgacacttgggaggctgcatcaggaggatcacttggcccaggagtttgaggtcagcctgaacagtataaggataccccatctcctaaacaaaaccaaagtgcctatctccagactcagagatattaatttatttattactttattattactcaatttattatttatttattactcagagatattaattatttattacttgactgcagtgtttcttaggttttacagctttttgttgaaggttgttttatcttgcccttgagagtagaaggggtgtgaaaacggacagatagagtagtgaggattgcaggattttgggtcagggagctgacttagtgtgcaaagacaccttctgccaatcctcacatcttgagttcaatccctgggactcacgcggtcgagggagtgaagcaatgtcaccaagttctcctctgacctctataaattcatttccctctcttccccttgcatattgcatacacacttatacatacacatctgtcaataaattaataagtaagtaaatgcaatagaatgagtcactaagcggtatgtgtatacctctgtatgtgatcgtccgcaaaactgtgcagaatcatgtcatattgtttcatatgttatatataaaaagaattcagagagtgagccactatgtggttgctgggaattgaactcaggacctctggaagagcagtgagtgctcttaacctctgagccttctctccagcccaagaattcagagagtgacggaagaacacaagtgcttcacgactgatggcttcaggtgcctgattgtcttacagcattgctaggtatgtttggtaaatgttaaatggtttgattctgtagtggcaaggagcccataacacggacttgacagtattcacagttctgtctctgcatgtgttacattctcagcaaggtttagtgacagagtgtggccagagttgttccctccctgcaatctcctgagagctcatgtgggtgggattatccagcctggttattactggggtcatggccattttctatgctagaactagtgaagacgcatggttttcagcagtttcacgcacttattagggaaaggagtgccctagttttaacattgaaaggccattttcagagacttgggacaccttgaatgaggcaacctttaaaattgggtgaattctttttgccttactattgagaatggtgagcagaagatagatgaatgaaagaaggaagagggtatggaataatagaaatagctgagaaagaataaaggaagaaaaatcactatggtgatagtcttggcagtttcagggacccaaataacacagattctactaggaccacccttggttatttaatgaagctgatatttacatatgtgtattcatagaaaggtgaaggggtctctttaactcagaactgtgttgttcttttgtagcatcacagggggttgtaattccatttctttgtcctaggatgttcagagttcctgctgggagagtcaaagttactggacagagcctagtgagctggcttttgggctcccgcagagactgtgcggtcttgatttgtttagagaaaagatcaaaggagggatggccttgaaaacttactttgtcagactgtttccaacaggaagtcatttatctaagatatgatgaggatgtgactggaaggaagggaattccatccatgttcaacagccttcatccacgttctgttttccttccttctgctgactttagtctactagtgggtaggagagggcacagtacatttgtgggcttggaattcctatgcagtttaatactcattgggattgaaaagcttgcatttccatttttgtgtagcctcattgagcaatcctgaagctagtctgtctgactttccatccatccatccatccatccatccatccatccatccatccatcattttaatctatcatccatcattttaatctatcatccatcattttaatctatctgtctatctatctatctatctatctatctatctatctatctatctatctatctacctacctacctaatctatccacctatatacaacctacctgtctatatctcctctatacacacaggttgttaaaagaaaataaacttattatttttcttgtttacctaggcccttttgcatatattttgatgaactctgaaacatatttattttgtgtgtctgttggctctcttcactatgagacctccacatagacaccaatggtatcttctgccttttaggaatttgttttaaaaccgatatattgtttgatatttcatttcaggctacccccctatctagagtgtctatgagacaccatcttgttaattctacacttgatcttagccaaaaggcagagaagtgatcatcttgttaattctaatgcctgcatgcatccagaattcatttactcattgtattcactgatcaatatcttccgtttctaagttactattacgtatattagaaaaactttttaaagttctaaaaatgggaaaaaatattagtggataccttgtttggctcagtcctctggattagctctaccttccattacttagtactttaatttcttcttcttcttcttcttcttcttcttcttcttcttcttcttcttcttcttcttctccttctccttctccttctccttctccttctccttctccttctccttctccttctccttctccttctccttctccttctccttctccttctccttctccttctccttctcctcctcctcctcctcctcctcctcctctttccttccttccttccttccttccttccttccttccttccttccttccttccttccttccttcctcttcttcctcttcttcctcttcttcctcttctttccctattattattattatcatcatcactataattactattactattacttattatttggggatgggcactcctgtatctcaggctggcctcaaacttgctttgtagctaaggatggccttgaacttcagcacatatgcaatcagacctcatttttgagatgctgtggtttggattggccctaaatcttcatgcatggtaggcaagcaccctgtcaacctagctccatcctcagccctacattttgttatttgaaagtacattacagcttgatacattgtagaaagtagatgatgaaaattatctcatccatagataaatctgtgttatttgggtctctgaaacttccaagactatcatcatagagatttttcttcctttattctttctcagctatttctattaccccataccctcttctctctttcattcatctgtcttctgctctccattctcaacagtgggggaaaaggaattcacccagtttttaaaggttagctgaaaaggaattcattattgccatagagcaacttatgcattttcgcactacatttgattcccttttctgcctgtagatgcgtagctctttgaattctcctttgaagtgattgtggtactgtatgtgttcttccagtgaacaatgtattagtaaagacttcagaccaggctagtgctacatttgcctgggagttatcatcccatctttttgggaccttgtctttgaacatgtggagcactatgaccagctatgggctctttcccctttcttcttttccttccaagctttgatgaagtagctggtgtggcctcagaggcctggttgcctccttttcttttagaggatgcttaatgttctgctcattgttaactgtatttcttttgaaaattagaattgtgtgtacttaagatgtatagtgcgagtttgatctctgttgactttcaggcccttggcctgatttgctcttaatttctttgtttctgctgccaccttctcaccatcctagatccacattgcctgtgttttcaaccgggcagctttcttttctttttctttttctttttctttttctttttttttttttttttcttttttcttttttttcgagacagggtttctctgtataaccctggctgtcctggaactcactctgtagaccaggctggcctcgaacttagaaatctgcctgcctctgcctccggaatgctgggattaaaggcgagtgccaccacacccggcaaccgggcagctttctacagcctctgtgcatgctttccttttcagccccgttctagtctgctcatgggcctcctccttgcctgagttgaaatgccatttagtagtggataccttttttttttttttttttttgagcttaaagataagggtagatatgtttttgtttgtttgcttgttttttgttttttcgagacagtgtttctctgtgtagtcctggctgtcctggaactcactctgtagaccaggctggcctcgaagatatgtttatatattaaaagattatacctttaaagtagctataattcaaatcacacttccagagtgtactggctggcttggtgtgtacaagctggagttatcatagagaaaggagcctcccttgagaaattacctccatgagatccagctgtaaggcattttctcaattagtgatcaaggggggagggcccagcccattgtgggtggtgccgtccttgggctggtagtcctgtgttctataagaaagcaagctgagcaagccaggggaagcaagccagtaaggaacatccctccaatggcctctgcatcagctcctgcctccaagttcctctcctgtgtgagttccagtcctgacttcctttggtgatgaacagcagtgtggaagtgtaaactgaataaatcctttcctttccaacttgcttcttggtcatgatttttgtgcaggaatagaaaccctgactaagacagtttactaaagaaatgagtgacagtaacacagacatttttttaaatatgtctaaaactatatgttcagaaaacagctagagacagttttattggaaagagatatataataatatattaattttataatatataaaataataaagatatataaataaaaatataataatgttttgagtacaaaatacctagtgttatttcatgaaaatagatacaataggttgagattcttactgtttttactaaaaatgaaaagagtaggctggagacatgacttagcacttaagagcccttgctgctctttcaggggccttaggcacaatgtgggtactgggaattgaactcaagacctctggaagagcagccagtgctaagctatctctccatctttcagtagaattcttcatcctgaccctcaactacttaattcacagggaatgaaaaaacttaaacttgacttaaagctccatgattttttagttgtctccttaattaaggatgaagggcttgatcatattgaatgatatggatctaaaactatcttttcctaggaagtatatgtggctatacagaagctaaaaacaattccctcaccggaggacacttacgtgtatgtttcatgttggtgtatcttcccaagcagatgtctgcctattatcgatgtatatagctggaagtgcttgttaatttgcccgagtccacaatgcttcagagccctggggtcctgaaaggcagttcacactgcagccagtcatggtctgatgttttatagaggtgaagagcaaaggagaaactggctgcataaagggttaagaaacgctcgctcctgggtgtgctgctcatttatttacggcctcaggcaaacctgggggcagttttaagaggaactgtgttttatgtttttatccattaaacacccctggtcatcattgccttgtagtgtccgggagtatagctgtgcaggaatgttaacaaaaacccatgaggcaccactaatttgtgaattccctgctctctgctacacatttccaaatagaaataagccctcttgagactgttgcatggtgtgtaaaaccatgcaacaaagttttggactttctagttgttggagtctgatttgcatgtggctctcccaggggagacagggaagctgttgggcaatgtgtcctgacttggagcctgcgctttctttggctcactttcagagctgctcatctggcagagccgagagactacaaattacagaagctctttcatcagtgcagttaggggaagaatatgcaaacttgaaaatgcagaaaatgcatgtttctgctttcctccttttgaaaagacaaattcccatgggtaacaattgcagactcgaaatctatatccactgaacaggaggcagggctgtgaagcatggagcctggattctggtgtgagttgctgctcacatgcagttgccctttaaacagtctgggacacggatgtgtgtgctctgctgttttctgctccttgaatcttgggagttaatagtcataaaaatgggatctggaaaagaagatgctacagaatgtgtggtcagagcagctgggagcaccatccccctggagatggttcatctccttgtgagtactaccagaggcactgcaggcttccttgagctgaaccatgtgctacccattggttttgatactcatttcatgtcaacagagctaattattttaagagctgtatgtacttcctcctcctcctcctcctcctccaccacctcctcctcctcctcctcctccatttatgagtacactgtagctgtcttcagaaacaccagaagaggtcatcagatcccattacagatggttgtgagccaccatgtgggtgctgggaattgaacttgggacctttggaagtgcaataggtgttcttaactgctgagccatctcttcagcctcatatgtcctcttcttaaaaagacatttcaatttttattaattcccaaataccaatgagaaaaaataaacaataaaatattctctatattcttgaccaccatctttaggatactctggtggtacttttgtaagctagctagctttctttcttgcttgcctccttttgcctaaattctaattgatttatttttaattaaaaaattaggttttgttttatttcgtgtgtgtgtgtgtgtgtgtgctcacatgacatggagatcagaagacaatgtgttgtatcacttcttccctttgaccatatgggtcctgaggacagaattcaggttttcagtcttggctgaacatgattttggataaaagcatttgagctattagctgaccccatgtgacattttttaagaattacattttcatttaagtgtgtgtgtatgtgtgtgtgtgtgtgtgcgtgacagagcacacacatgttgtcatgaaggcgtccatgtgtgtgtatacttgtgtactggtcacagagtttacaattccttaagagactcactattgactaaccctatatttcctttggatgtggccctgccctacttggtgattgcctgtcattcatcttacgactcagtatgcctgtagacaagacttacttgcctggtgtgatggtctagaaaattaccagtgctgcacaggccaattcagattttcaacttgtcttttaaacaggaagccctgccaaacagcgagtcttgatttctgcatggtcatgctgtgctggcacagagcagggagcacctgctgactgtccatgtgtgacggatgcccatcagacatgcttcccttcatcatgtcatcacatgtgtgaagcctgctccctacagctgcctctacctctccttttgcttagcaatgattggtagcatctttgcccagatgcttttaaatgcagtcgcactcatgttccaggaaatagtactgatgttgcagttctcttgtcaaaatggtgggcccagggctggtactgagattgtccaaagatggactagtagaaaaggatgagagtgggggccagtcctaattaggcagtctaggactacagccatcatgcttctgtttattaggctttgaaagaaaaaggagattcttagagtgatggcttggtggttaagaacactggctcctcctacaaaggtctacagtttggtccccagctcacaacaattctgggagatccattgcccagttttggcctccatgggaacagcatgcatgtggttcacagaccacataaaggcaagagacccatacacataaaataaagtaaaaataatttaaaaagtaaaatgggacataagtgttatcttccccccaagttcaagattgcttttctgtaccgttttgtgtttattagtaagtaatgaaaatggtcccataaggagactggagagagtgacgtgaactcagcattttgccaggactaaggcacaaaggggatattcaccaaatatttatgtgattgggttattaaactgtattttctctgccaaagaagttgctgcaagtcagtctttgcacagatttaaatgtgaggttgatgttcaagatgaatcagtccttatttttattaaaagatgacttttgacatttctagacttgttcccagagccgatgtttacagcccacatcacaaaaaacaccagagatgctttacagtgggctgctgggaaatggtgccttagtttagtacagtgtggtgatttatgctgttgttctgagaagttgatatctatctatatattcatatatctatatattcatatatctatatctataatctatacctatatctatatctacagctacatctataatctatgtctatatatctgtatctctctagatttcaatctctactaatttatatctctctatatcatctacatttctgtctatctttatcccaatcctgcaattaaaatgcttgctcccctgtttactgcattgtatgccttggtaatatttattggctcaaatgttgagaagatggacttggagccaggttttgtaagatcagatcctggttctgtctctcacttgttatgccacctttaggtctcagtctcttcagttgtaaaatgggaatgttgaagctgttccctttagaccacttaggaggaaagaatatgtataaacaatgaatctaaatccatacaattctcagaacttaacctatgcacacagtaaatgctgactgttattgtgttagaacattttactatgtcactgtgtggttttgcatggtcttcaagttaaaatcatttttatatttacagaggagcaacatattatcttataatttgtgttaatgctatgaaatttggacttcagtgttcatgaaattagaacaaagttgtctttcagttggcttactcattcttgtatgattaatgactgttttcccattacaacagagctgagtagtttcaacagagaccacacagccaacaaagtctaaaatatgtactgacctgtccttacataagaagtgttctgccctcctgtgtagaacaaggaccctgcttacacaccagctacttgtacatattgggcggggacatgtcctcttgggtactactagtcctttctgtatttatgtggaacatttggaagttgcatgtgtcagggatatttagtgttttgtaatgacagtctaagtgtgcgctgagtgtacacacttggatatgtgtgtctgtgtgtgggtgcatgcatgtgttaattttcttttcttgtagtgctgggggttgtatcctgggcattgtaattgctaggcaaacctatcagtggactacatctctggctcctgctcaggctgagtttggactttctgtgtagaccaaaaattgtagttctcctcttgcatgctgggatatgtgccgtggttgtgggttccatgtatgtttttcccccagcacattttcagtccgtgtcctattgctaaaaatatatacacacaggtgtgtagagtttcttactctcacagacagttccttcttcaaggagtcaaaagtatttaaaactcccaaagacggtgtgactaagaagctgccgagtctacagagtgagatctaggatagccaaggtgcaaagggagaccttttctcagaatgaaacaaaactgaaatcaaaaaccaaaaactcggcggataaactaccaagaaaagaacctgccttttctagtgttttgatgctgaggcagctcgttaacattttcctgggagacagtgctctggacagagcagagaagaaccagggaacggccatgcctgtgcttaaaggacaggaacgaactagtctcaagtagagtattttaatatttttcaccattttaattgtaggaatgggtggaaactagtactgtggtttaaagattgatggcttgctgacagaatacttgcctgtccttgggggaatggttttggtgctgggtaactggatccaggggcctgagagtttgacagagcacagaagcttgcttgttgattgagacagcatttttctgtgtagccctggctgtcctggaacttgctctgtagaccagggtggctttgaacttacagagatccacctgcctcccgagtattagttaaggccatcactcacacataagttttacagcacagattttgatgagttccttgtgagagtctaggcaccatctcttactctctccagcggagccccatcaccttccttgtctgccattctgcagggatttggggttctttcttagagaattgactgccagtgtaccacacccatgtgtgggaacatggagggaagggcacacattcacagcacattctgtatagcttgtcgtcagtgatcgtctgagattgagaaacagaaggaagaaactgagctgtcgttaccatgagccttctgtttaagggaaaggggtactctggtcatccttgcgtttatatttgacttttacagggacagaactgcatcttcatggttttttttcccatcagaatattctagaggagcctttcttaaacttgttgcctgttaaacaattggactatttggacgtgagggaaaaagagtgtgccattaatggcaacttttagaagtcttcgtttgcaatggagcctttctggcatctgtgttattcctacataggtgtctgtgtgaattgtttttgaataggaaaggttcccacaagtgaccatttctgtgaatttgggactgggaagatactcattccataaatcccctcagatattatcgaaaatgtatggttctttcagagaagattattttatgtgtctgaatgttttgcgtgcatgaatgtatatacaccatgtgtattcctgctgcttgaacagttcataagagggctttgggtcccctggatctagaattgtggatggctgtgagtcaccacatgggtactgggaaccgcacctggatcctctgcaagagcaacaagtgatttcaattgccaagccatctcttctgcttcaatagtactttttataataatagaaagcatgaaggttttgcttgtggtataactgataataatactgggttaaccatttgaagtttttgttttgttttgttttgttttttcgagacggtttctctgtatagccctggctgtcctggaactcactttgtagaccaggctgacctcgaactcagaaatccgcctgtctgtgcctcccgagtgctgggattaaaggcgtgcactatcatgcccagcttccatttgagtttttaacaaacaagtgagtgtgtaaagaccaggtaacatgactaaagtttgtggctagtgtacagcacaacctgcttgtgtcaaaggacactgatagatatcaacaattatctgatatggggaaataatggaatttgcttcactttataataggcttttacatattattttgttgtacgttggaaagtgaatgctagtaggtggcggtcccctagataactcattctgttctatggacttgacctcttatctttctctttgctgcgtaagacatgagagaggattgagctctgtgtgagctcaggagaggagcctcgaagacaggctgttaacaagggcttgtccaccctttgctttgttgatagttcagaagtctccagtgtctctcgaaagtggcatctgagctcatctagtctgcttgttgctgtagttggtagagataatctatgtgtctacaacacggtggcaaaccgaagagatagctgtatttcagagacagggtccagcttattccccactgtttctgtggtgggccacatgttccctcctagagcctatgaacttttaagatacatgctaagaattcttaacagattgcacactatagttattcaaaaccgagtaagaattcagtaggaggatcagggaacccttcttttcttgtctcaaatttaaagtcttgcttcatatagtttttttttttttttaagtgatcacaaaaagatagttcttgattatgtaatatctaggactggcagggaaggacttttagctctatctttcatatgaagaagtgacaacatccaagaccattatagatttattacatcatggtttatgatttttagtacattctcacatcacattatactttttggtatttaacatagccggtgccttaagggagcttaggtaactgattaagtctcgttgggtagttcttggtcagactgtgtttgaaactgaggctcttgtttttttctgtgcaggaatttccttgtgtttgtggactgtggccaaacacggccaaaagtattttaaatgttttcatttttcttacatttctatatttattagcatgcacatacacgctctcactcatggcgtggtgcccctgagacagatggtgggatttcttctctctttccactgggtgcattctggggattgagcttgggtcatcacggtcaccagagagcgtatttgcaccttgaaccatctcaccagccccgatgtggaacttctggtcctgaagtcgaccttagttttcttcttcttcattgcagagtgggaaaccacccatcagtgatatgttctcagacctcaaagatgggagaaagctcttggatcttctcgaaggcctcacaggaacatcattggtgagaggacatctctgatcattttcctcagacagggtcttgtttccctcaggctagttacaacctaactgtgtagctgaccttgaacttctgatccttctgcctctccatcctcccaagtactgaggtgtccaccacaccacatttgggcagtgctgaggttggaacacagggctccatgcatgatagggaaacactaccacttgagctatgtctctagcctataggagaggatggccatctctgagaatgtggctgatggagtgcctctggcactgttgagattgggagattctctctgggtactaaattgtgaagcctgagtactgcatcctctgtctgccttcctggccgaggctgggcagcttcaggctaaaccgatatctctcatgagattccctggcccgtgaggtagaaggaagatgactagcttgtcatgccctaggtggcacactcttctcatgtgacttggagtttgggacaatgtctctttgctctgttgttcctacatgggcaggagaaagcaggcagactattctgctgtttttttctgcctctggagaagtttaaataaaaaagctttgtctgacagaattgattctcaaatgtgtctacctgcctgtgaagagtaactagagcaattttgaaaatgctgaatccatgtcacagcctaagtcctttaaatcactgtctcatgtgggggcaggaaactgccaggcctgtttgaatgtctcctagatgattttagtaggcatgctggtaaatgagcccatgtttcaggatgttcttagtgaatttccatcctgtggtacccaggctggtgacatggatgctgacctgctattctgcttccgtttctgtgtcagagtttgtcaacacatgaagggatagggactcttacttggtttttgtttgtttgttttattttgttttgttttgctttgttttccagccaaaggaacgtggttccacaagggtgcatgccttaaacaatgtcaaccgagtgctacaggttttacatcagaacaatgtaagtaacatttagggatctcagctgctgcaggcattgttgtttgctgggaagcctgctggttgctgtatatgtcagttgatgcttggcagtgtttcctcttggtgggagttttgaatttgttctgtgagtgacggataagtcacatgccttttccgatgctctcattgatctgtaggataaataatacgcttttgagttttgcattgatccaattcctaaaatgaaaattttatccttgtttatattgctgtataaatatacttaatcaaaaggtttggagttcgatggtgacgctgtcccacgaatttaattgttgtgttattattttgctctgacaggtggacttggtgaatattggaggcacggacattgtggatggaaatcccaagctgactttagggttactctggagcatcattctgcactggcaggtggggaccttcccagtcaccttgagataggcctcgtattattttctctgttcattttctacagctgtcaaatcgaagttccacaaacggcttggctggaataggaggtgtttattgcctcaaactcctcgtgtctgcaagtctgcaacccaagtgccagcagagctggatcttctcagcagctccttgtctttctcctaacttcgagtttgctgtaaactgcggtgtgctggcttaggcaagcttagtcttcatgacacactctctgtgttggtgtccagatttccctttgttctttgggaaggtcatcagtcatgctgtgtttgaaggccaccctcctctactgtgcttgcaccttaaatagttctgtgtgcagcggccctacttcacacagggctcaattttaaggtgctgatgttctggcgttagcatatggatctccagagaacacgtctaatttacagattcccaatggacagtgttggcagcctgatatagatttttggcagaggagaaaaaaaggtgtttcatatttcattgagaaaactgctttgctttcagcctcataggaggttgtaggagtagcctaagggatttccaaatgccgttcattcagattccccaaatgttaacacttacccgcatttcctgagcttactctggcgttctctgtctgagtactttggatgctctttccttttataaaacaccaaatacacttcccaagcttcggtctaaaaacatggcttaaaaaaataaaaaggaactccactgtatagccacaataccattaacatacaaatataaaatgtgtactattaccatctgttactgtgttatcacaatcattaagtaccaaaatgatagatagttgtcaaagtcaggaagatgattttgggatagtggagttatctataggtctcatggaggtttgactcacctcgtcagtaatatacccctgggagcgtagctcagtggttcagtgattgacagtaggcatgaggttctaggctcagttcccagtagcagtggagtggagggagggaggcaggatgataagccaggaaaacagtaggtccagatcatgagcgatgctcattgggtttctctttggtatctcttcaacctgggacactttcggagcctttcttttcaccgtgctgatgtttttgaagaacactgaacttcatacaatgtccgtgggattgactctgcccaccagcacgttggatcgagcttgttccttgtatagacttgttacaggagaagtgttgaattttctcagtcaccgtgtcagggtcatgtgctgccaactatctctctctctctctggccatatttacttaggttaaagtggtatttcccaagtttttctccattgtaaggtgactgtcccttgttattaagtgtatcttgttggggcgtacttagtgacagtataaatgtctagttagtttcccaacttgaaccattagttttagcagccattcattattattacccaaatcattaagatccttgccaaatagtaagtttctgatgccattgttccttctacaattattagctagctctgtttataaaaaaaatcggtttttatcagtgtgtcaaccatccacccatccatgcatccacccatccatccatcaaccacccacctgttcatcaacgtattatgggcttttatataagtttattaacttttactaatattattcatcttgatatggcgattgtcttagattcaactccttctgatcctttacattggctaaaggtccttttgatagatctctgtcattctctgaggcctttcttatgcatatggatacatattgctttaggataatgacaaactgtcagttcttaagagtataattattgctatcaggaaaattacttaattctttgcgttataagcaggtgtgggtctttctgcacaggtgaaggatgtcatgaaagatatcatgtcagacctgcagcagacaaacagcgagaagatcctgctgagctgggtgcggcagaccaccaggccctacagtcaagtcaacgtcctcaacttcaccaccagctggaccgatggactcgcgttcaacgccgtgctccaccggcacaagtgagatgtcttccggtctgcaaatcttacctcctctgtgtcttttttctacttctcttccccatagtcccttcggctacctctgctgcccacattgctcatgttgaaaagcatcaaggaaagcaataccatgcagatcaaccaccgggtatctctttcggacttcagggctggagtgcaaagcccatggtgtctcctacacatttataaactaagaagtgtaagataattgacatagttcactcccactcatctggcctaaccagtaacacacacaaagagttgtgtgtagcttttcttctgatagcagaaggacaactctgtttattgtgttacccacatttacgaagagctatacaattttcttatgaaatctcataaactagattctaacttgtatgtaagaatttaatacaaaagtcgccattataccccagaagaataaacagcctgaaataactttctagtaaaaaatcatgacactgtatgaatacagagctataaaatggagtagaatcattatagttgcatgtaaaggtgccagcattggactgtgctagatatacaagaacaagctcttagagcttccatcctggaggtactaagagctgaggaagagctctcctgtatagaccggtctgataaccagttgagctgacattgcaactgaacatgcggtatggggcagttggttaaccatgtaaatatgtgccttgacacaccagacaagtaattctgcatccctcagagattaagtgccaaaagcaggaaaagtggattgtgttttgttgctgttatgaattattaattttctcatttaatcccctgaatgttcttgcctgctatatacaaatgaagtacaagcttctgtatttatgttctacatttcactaagtttatctctgtataatataggtttggctttctttgtttcttacttttctttctttttttaatctttgctggtagattgttaggtggggaagtagccatggctgaatttaggataaccttaaaatgtgttatccttttccccttctcctccttttctttataggattctgttcttcatgtagtattgtttcaaattagtgacagtgagaagaatgtttgataccaaagcaatgcttttaatatttttcacataggatcgatgtgtgctatagatttaagttttggtattttgatttgttatggggttaaagaccctttccctctcctgttctcccgctctttttctgtcatcttgaagatcctgtcctgtactgttaagaaactgttgcatttatccattatcctttgcctttttaggctctttgattcaacaaatggatataaagtgtcttgcactagacacaaggatagagcaggagcaaaacagacaaacatctcagttccttctaactggagacagagatttatttagaaaatgtaaattatagctgggcatggtggtgcacatatgatctcagaacttgggaagtagaaagatcaggggttctgggtgatcctcggccacctgtgtaactattttgaggtcatcatgggctacatgtggaagactctgtctcacaaaatgtgtgtatggggatgtgaagatatagaaatggtagacaggctaaagaaaaagacgatagatgagagggaagaggcatctgatatgggggaggctggtggctgtggtggctaagggacagaggaagaggtagaaaggagaacgggggtgggggaaggggagaccagtctcagggtgcatgtaagatacaagagtgaagtgcaaagaaagggaccaacttttaggtctgtcaagccagtgatactgtccacgatgtgaggctggaagaaagacaagatgtaaaggaaaactagttttcatggagaaagatgaacggaagggaaccagccccctttgcacctctgcttttaggataactaagtccagttgcactagagtatctgtgtgctcatcttagtctcttctggtgtgtagaggcatcaagtcagggtctccctctgcagcccaagctggactgaaactggctatgtggatgaggccagcttttaattggtgaccttcttgtcttagaacccttagaactgtaatatcaggagtgtacctttgtcctaattgtggaatttagtctattaaaatcattaaatttgtgaagcaataaaatcatagaatccattaatttgtagaatttagtccattaaaataattgatttggtaactcatatatttaggttcgtttttaccactgtgttggagcttatttcacctcctgtttctgtatcattttcttccccggtcttctctgtatccatacgtctcctttactcataatatactgtctgggaaacactgtacactcaactgtgccaagaacctgagattttcttacttattgttatcgttgtcacacatgtcacttttagattttacaaacttgagatgcaaaagatacaatttaaaatagcactcacaaattaaaaaaaaaaattgaagtgcaatgaattacggtgctatctacattgtttccattatatttttctgtcactgatttcagaccagatctcttcagctgggacagagtggtcaaaatgtccccaattgagagacttgaacatgcttttagcaaggcccacacttatttgggaattgaaaagcttctagatcctgaaggtaaggttgagatcttgattctgctatgtataagtttgttacataaaaacctgctgaacttgattctgctttctaattttgaacacctttagcagtgatgatgtttttcttttttacaaaacactatgacaattaagggatcctcattttaccatattggccataattatatctttgtgttggttttcctacttttctgtgtgtagtatgtgtggctgttgtgcatgagtggagtgggtgtgtgcacatatgtgaatgcatgtgtgggccagaggagggaatcaggtgtctttaccacttcccaccttgtcttttaagacatgggcgctgtcagctgggctgactggcaatgagcctgtggggtccacctcccgtctcccacaaagcactttattgcagtaaatcttttgtcctgtttgtagtctttagacagcaggttaatgatttcaccagataagagttaacttgtatcaagtaggattggaaaagtctaggaatacctacttgctagagaaataattcagaattagtttggtttcttggaatgcatgtacgtgtgagcatttgtgtatggtttgaagactttaattgcaactttaggtttgaattctgcccactctattgtgtgagtgaagcctgtgccatattttaaatggctacatgagtagctcttagagcattttgagacagttttttgtttgttgttttaaaatttgttcttgaaggcagggtcttagttagtatggagcctaggcagtcttcaaactcatgaacctcctgcctcagcctgtcaggagctgaattgcagtatgcattatcatgcccaccttatggaaaacttaagaaccggaggctgaataagtcttcacctctgtccatattttgtgatctgcagcagcaatttcctgagaggcagcattatggagatcacaaatgaggcattgtttctgggtacaagaacagtcactttttacttggtatcgagcagtccacacgtttctgagtcatcttttcttctgcttttagatgttgctgtgcatctccctgacaagaaatccataattatgtatttaacgtctctgtttgaggtgcttcctcagcaagtcacgatagatgccatccgagaggtggagactctcccaaggaagtataagaaagaatgtgaagaggaagaaattcatatccaggtgctggctcatttttctcgaaacttttgccgtgcctgtttgatttcccccaggtcaaacttgtgcagggtgttttctgaacatgtgtgtgtgtgtgtgttttttttttctgagttccgttttttatgaaacagggaagtgttttgtttctcaaggtgagtagcgtctggggctgttgatcgtggtgctgtgtggtacgctaaaagctctactatggagtcaactggatgctgagtggtggattctgtttatgctgagaggccaaggcgttgacctggtgtggggaacgttttctctcatgttgtcctgggtaatttttgttaagtagtaattttctttctgtttggggtccattaatagagaacttttgcccccaatatcttctcataaggattctcaaaataccagccttactttccctttcccctggaagaggcactgtactataaatcattcatcagatttttccagaaatgggctaacagatgatttcaccagcaaataaatgagattttcctaaggagatatgaataatggatttttttctttctccattaccctggcttgactcaacccatattttgtctctttgtgatttttgtctaaaatcccattcttcttcattcataaaaggaagaccgttcagattttcgaagtcatgcattttagcaactaagtccagatgttcacacaggcgctggggagatggctcagtcagtagagtgctctatgtccatgcctgaggagctgagttaggatgccctgcatgtacatagacatcgggtttggtggtctccctgtatcctgatgctgggagacagggatgggcgggttagcggaactcatgggtcagccagcataagtgagtcactgagctccaccttcagtgagagacactgtctcagtgaaggaaggaaggtggtgagtgattggaaaatacactagatatcaacctctggctaccacattcgtgtgaacacacatgcttacacaccacatagatatacacatatgaggaaaaagagggggtgaggattgcaaatttgtgagaagtgcattttggatgagtgtgtgccctgcagcttacatgtcaccctctggtacttggatggggtcagtgacttggcctcttgaccactgtggttaatgttacctccttggcaaaggcaacacaaagaatactcacttgctaagcccgtttctctgtcattactatagatttctctccagatttgctttgacattctcatttagcaaatttgctttcatttttttaaaaaagttactcaattttccaattataataatcttgaacatatcatctttttcccctatttttatgagattcaaagagtttacttactcttttagattttgggtggcatgtagtaatcattttatttttatccatttagaaaaaggagaaaaacaccttattgaataggaaaagggagagatggagcctgattgtgaatcctggtttctttttagttttgatcatcaaataatgcagaaggaaaacccttaactactgcaaattgtttaccttggctcctggacactgctttggttcaatgatgtactttcactgggtgactaagatggtgttctgggctgtcctgtaggtcttgcctcttgtatttacagtcatttcttcattggactgatttatttttgttaaaaagagaagatatttcaattcttagtgttaaggctgtcctctcaaaaaggaagggccattaagatggttcagttggtaaaagtgattgtttgttctgaagcttgatggtttaggttagatccgtagaactcacataatggtaggagagtgcactatataattgttcaccagcctccgtatgtatgtatatactcatacagaaacatagcaaatcataggaaaaagaagtggattttacttattttatggtatttagctaaaacaatcacttctttagcatgcaaggttggtatggtaagaatttcagaaaccactttctatttgttaatgactgagtggtttaatgctcacgctgtttattgtatgcttttattggtaacttagaggctaagttccattaagtgagggaatgatgtggtcaagtcttgattgtctcctcgttggcttgtcttgctgtccactgttctctaaggaatgctgactgccagccagccttctctctgaatcctctttctcccaccatgctgagtagcattgggaggtcagtaggcaatccctgagtttccctttagaaacacgccagttgaaaagctcctgcgtatttacatggagaggctttgctgctttccacccctcggggggatgctggtgcctacacagatgacctttggctgatgactagcagtcctagttttgcatgttcttcccattgtctagacttttgcttacctcaccttctgaattatcttagcactgtgacttcaggcctttaagttgagagaatgtagcttattttccttcctatgccctggcattgtttgcgtcttaatttgccagtgtttttacttatgatgactggtttctttaactcctataactcagttgaaaacattcctttgatctctcctataaaacaacattttctgggcttcaaccccaagttttcatgaggatttaatacctcttatgctttaaattgcagtcagagtaggcttttcttcattcctgattcttatgtgtgttgaattccatctatgaaggatcttctacctatatggtctctgagcatgccttccccttttcctacacttaaacagaacctttgagtttctccctaaccaattaagatccgtctctatgtgcccacagtctttcttgccctgtcagtatttttgtgaactatgtcaagaattttaaatagtgacttaagaccgtggaaaggatagtgagggatttcaggccgggcgacctgtgggtgtgaacacatgagagagaccattctctctgctgcctgagaagtggcttggcagataggactgtgggtgccaagggttagcaagccattgtgggccagaggagagacgggtggtgcagaagtggagaggtctgcatggatttgagttgaactttgaaggtaggactagtttgcagattaaacacgggagagggaagaaagaggggtgtgtccaagtatatcacccaggtttttggctgtggtgcctaggtgcatggagcctggggtaggtgttggcaagttttggggtgggtgaaacaaatgagtgtttaaatgtgggtctggtttgatatatctttaaagatgctgcagatgttattgctgctgaaagttagaagagagttttactagaaataaaatatctatcgaatctagattattttttaaaaatcaaataggaatagatgatatcacttagttaaggtatatcgaaagaagggagaaagaagttcaggagggttactgcttgcagatgggcagggccactggattgggaaggagagctttggaagtcaggatggatcggctccaggcacagccactgggaggcttctggaagaaccacgtgagacctggcttctcttgtttccagttggtgcctgttattccggcatagctgttatcagaaacattttaattgattggctaattgtatgattactctaaaaagtaagtctgggaaaatggctttgtcagcttttcagtcatttgggggcaaatgttgagactgttgaagcagactgttaagactttggtggtaacatgtgtaggcatgacttttaccattctcctcatttatgtacatgtgggatagtttacacacgtcttgaagaagttttgtttgaatggaaacaaaggaacagcagagccagtaggcttgattacaagatcattaagtgcataaagagaaactagtaagttagagaaagatcggcagacatttattttacaagtcctaaccctcaaaccacatcccccaaacagaacagctcacacactagagggctgttgcctcaaaacaatgaaacatgaaatcccatccgttccacaggttgtatgtgcgcccttgttcactgtttaatacatggcaccagaatgcagggtccctaaagaattctaagcaggggtcaaagcagagtgtcaggctctctattctgtaaactgcaaccgttgttcaagggccagcatgttcttagttctccatcaaaattctctatgtcttgaagtcaaatactggcatttggagttttatttttgtccagtgactcatgtgggatatttttctctccatgcctcttccaatgtggcgcttgtgtgtgtactctattttgtatttcttggctgtcagtgtcctctgattaattcatggcttcattcactcagctcctgaaaactgggggttgtctcctgagatcctagtccctaccttggtttctccagacattgctcatgtggtgagcgtctgtatgttcatggttgctgtggctttgtttccacagagtgcagtgctggcagaggaaggccagagtccccgagctgagacccctagcaccgtcactgaagtggacatggatttggacagctaccagatagcgctagaggaagtgctgacgtggctgctgtccgcggaggacacgttccaggagcaagatgacatttctgatgatgtcgaagaagtcaaagagcagtttgctacccatgaagtaaatatctgtggccgagagccatatttttccagggccgggcctgatttttaggggtggtggtaggtggagtgacttcaccattggcttggtatttaccaaatgatgctctgtaaaaagatcatgatgtagtgcctgcattatttacgtgggctttgttagaaaactggagtgatcgacagttcatgagaatcagatttcaggcagtcttgtgacattttgtgtatttttttagaactgaggattaaatcagtgtgaacattgttcctttttgaaatattgagctgtagttgcaaatcaacatagccaactagtatcccaaataatcaggtttctcatgctaccctaaaagccagtatttttatttgttgtctgattaagccagtgttatatccagtgttcctgcacgattttatgcaagggcagctacctgctatttagagatagaatcatgatttttcactctatgggaaattctttacggttaagtgggttcttgtgtgtgtgtgtgtgtgtaagcagctcctcttctccttcttcttcttcttcttcttcttcttcttcttcttcttcttcttcttcttcttcttcttcttcttcttcttcttcttcttctctatttttacattaacaacataatcatcatttacttaagagatagcttagctgttaaaggtgcttgctgcaaaactgatgatccaaggtcggtccctgcaactcacttggtggaatgacagatccacctcttatgagctgtcctgtgattccctatatgtgtgttgaaatgctgaacatggtgtgtgtacatggacacattcacgggtgaatggggatacacacccatgaatagttgtaaaacttttaaaatctactattatcatccataacattgttttctttgatctagctttctcttgagttatggttaataccaaatctctcatttcagagctttccacctttggtgaaagcctcctccgtctttgctttgcacaggttcctttctctggggcgttgctgttgggcttatgcactaccagtttgttgtttcatgtcttcgcagcaagtgactcactaactaccacaatctcctttgctagacttttatgatggagctgacagcacaccagagcagcgtggggagcgtcctgcaggctggcaaccagctgatgacacaagggactctgtcagaggaggaggagtttgagatccaggaacagatgaccttgctgaatgcaaggtgggaggcgctccgggtggagagcatggagaggcagtcccggtgagtggagctcaaggaccgagagcctgactccccagaccacagtgcacagtgacactcaagtacaggcctgcggggctgtgactaaaatcagtacagggcaagccttccactgtcctcacaccgctctgtgagtctcatctctgtcaagatcatagaggacagttggaatgcagagggtagtaagaggggaagttatattttgcatgggtgatattgtaattttatatttgttacagtgataaaacaccctggccaaaaaggcaacttaagggaggaaaggatttattttagctaacaattccaggttttggtctcattttggggacccccgaggagtgggagcttgaattcagtagtcatgtcactgcacagtgaggagcagagaagaatgactgtgcccatgctagtgcccaactggctttctttactttcatacagtccagggccccaaccagggagtggtgctgctcggtttcagactagccttcctatatcaattaggttaataatcaatgcagctccccacagacaaggcctcaggttaacctcatttagacagccccctcattgaggctgtcaccacaggacagtgtgccacgggcctacttactgttcagtggtctgtaacagtttaaagagcaggcttataccatggtctgtttcactttccacgttgtgattcgcgttccggtgccgtttccaccaatttaatacgccaggaattcctgagtgtagaaacaatgattctgttttgaatacagggagctgttatttatattcctgactgcccttaatgaactccagttatgaatcaaatcagagctttcccccttagtttctatactgatggactctctgctacttggatggttagggtacacaaggctgtgttttcctgcccccgcttccctggtgctcagagtgggtgcccgtgccaggggacaagcccgagggaatgacactctgtcctcctggccaggctgcacgacgctctgatggagctgcagaagaaacagctgcagcagctctcaagctggctggccctcacagaagagcgcattcagaagatggagagcctcccgctgggtgatgacctgccctccctgcagaagctgcttcaagaacataaagtaaatttgctgcttgttccttttctacttccttgtgtaggaagagtgctgagctgacccggggcctgatggcttctctcggtgtggagttgggctacttcttccctgttgctttttattcagaaggtgttcgttgggaggtgacattttggaaagagacagctttgcacacatgtccatgtctttcttctgaaagtgtgtgacatttgtcacatttggcaagggtgatttgtttgttttttgtttttttttgttttgttttattttttttataaatctttttaataaagattaatttatttattattataagtacactgtagctgtcttcagatgcaccagaagagagcatcagatctcattacggatggttgtgagccaccatgtggttgctgggatttgaactcaggaccttcggaagagtagttggttctcttaaccactgagccatctctccagccaggcaagggtggttttggactcacaagtgcatgagaacctgaacatatgggcaggaatacacagtgtgggtggagaaagaaacagggatatatacttatacttaattaggattaggatatatacccaatcctgtcagggagactgttacctcttttttttttctttttaaaaaagatttactttatttattatatgtaagtacactagctatcttcagacaccagaagacggaatcagatggttttgagccaccatgtggttgctgggatttgaattcaggacctccggaagagcagtcagtgctcttaaccgctgagccatctctctagccccccgttacctcttttcagaagagcatgaagtgctgagtgaggaaccagcacatggtggacagtgtggtttggttctgagatgagtggttcggtttttatagcagaagaaaggtagaattttgttgatcagtgaaacatctagatagctgatactaaggctttagggtcacatgaaacactacccaagaggcatttcaccatactcttgctactgtttaaaccaattactctctacagatgtctaatgactgttctcttcctgtggaagagggaagtgaaggtgtccatatgcttgttcttggttgctctcttggggagctaatcagaatagcttctatgagtcatacagccttttcctcattttgcacattatggaactacagaaaatgacctctgattctatttgcttaaactctgggtttttagagtagtcaggtctacatttttgtcttttttattttccagtgtctcattgtgtaccactagctgacttggaactttctatgtagaccacgatggccttgcactcactgcgatcctcctgtccctgcctctttagtgctgggatacctgcatatggatatatttttattttaattcctagaatagacacagattttcttcttttcctcctttccttcttccttctcatcttcttctacctcgacttgtttttttgggaagaattaggactgaaaatggcacacattgtcacacatttacaattggttttgaagttgcactcgcagactctggctcctaatgaaatgtaagggtgtgttcaggtttctttctttagtatggtacttagggtaatggttgggaatggcaataccatgcctcattaggttccttaattactatcgtgaagaagcggatttttaaataggtaaatgaggaagagcagatatcatagtttatcttttcttttttcctctagagtttgcaaaatgaccttgaagctgaacaggtgaaggtaaattccttaactcacatggtggtgattgtggatgaaaacagtggggagagtgccacagctcttctggaagatcagttacaggtaagaccttgagaagtaggatgcccttcagatccactctctggtcaaggtccatgtattgttcctcctgggcatccttgtttgtacagaagggtataaaaaagtagactcctttaatcatcttttcgttactgtaatgaaggtcctgaggcaggctacttgatagagaacaaagtttacttagctcacagttttggaggctggcagttcagacagcctgacaaatgttctcccttggctatgtctaatagaacagaaacatgtgtatgtgtgtgttgtgtctctgccttaattttttaatccattagaatttatcatgatcggccacctttgtgccctgatttagaacccccctaaaaccaaaccaaacaaaacaaaacaaaacatcagatttccccaccctaaccagaaacaaagcccatcctcaatctgaatttccaccttcttgatactatttatgcaaatcttttttagttaaattcttgtttgaattcatggtggggtggggtggggtggggtgggacacaaagcatggcacctgtttttggttgtatctcccagttaggcctcctcattgtgtggtttcaggcttagctaggcattccttgtttcattcgagtccttgcagtgaaggcatgagattgttattctgctcccttgtgtataatggtgacaacatttaaaagcaccagaactcattcaagtgactcccaggcttcccccagaacagtcacttgaagaattggtgaaggcaaccatagcctggaaggtttgaagcatagaaagtaaacatgtagattgtggttgtagcagtggttgaaaaaaaaaaatacaacaaccctcagacacatatacccaattttcaaatacatgtgaaatgttgcattcccatacaaaccttacagtgaagtaggaacaggaattctagttttttttttttcctcatctctgagtaatttaagtaagtctaccctatgaaagttagtttttttctcatatatgtacttaaaagtattttttgtagattggtgttttggaaaactgtagtaattgtgtctcctggctgggctgacagagactgcttctcccttccctagaaactgggtgagcgctggacagctgtatgccgctggactgaagaacgttggaacaggttgcaagaaatcagtattctgtggcaggaattattggaagagcaggtatgaaactcaaccactgtccactgaggacaaaacagtgacaaggagcccatcgtttcagtatggctgtggaatgtggctgccctcttctctagtgagaattctggaactttggcttctttaaaaaacacagaaatattataagaatatgttttttttttatcttaggttgttccccctcccccagtagctgattatgatttgcctcgtgctctggtggggatgtgattttgccagctgcagatattttctgtgattgtgtggcctttgtaatcctgtggactcttcagagggtatatgtcatagtcagggtttctattcctgcacagacatcatgaccaagaagcaagttggggaggaaagggtttattcagcttacaattccatactgctgtttatcaccaaggaagtctggactggaactcaaacaggtcaggaagcaggagctgatgcagaggccatggagggatgttctttactggcttgcttctcctggcttgttcagcctgctctcttatagaacccaagactacaagcccagagatggttccacccacaagtggtggtgacactgtggacaaaagttgttaatatcatagtggataagaaggagaggggggtagagagagagaatgagaggggagagggagagatccttaatagggaatagcatataaacaaagaaatgtgtcttgcaatttagaaggtaatgagtccaatttggtgagggcttctttctggctcacaaaggatcctttgttacattcttatcaatttgtagaaggaaaaagtagttcttgatcactaattgaggaaatgccttacagttggttctcatggaggcatttcctcaactgaagctcctttctctgtgataactccagctgtgtcgagttgacacaaaactagccagaacagtatataaatcctggggccctgagggttgttgggttgttctttgttggtggtcaaggttagtcctgcacaaagaagaaacaacaagaagaaattagatatcctgacatcgaaggacttggcacccgtaatcagcaggaaatagtctaaggataacgttgacccctttctggtccctgactttgttcatggatctctttgctctctcccctctattcttttctccctcctatctagtgttatggaatcgaacgagttgaaggcgtaggtagaagagggtggaaggaagaagaacccacaaagtagccaaagaccagctagctacactcttccctttttttgaaaggccttattttgaaaataatttatgaaatttggaaataatggtttgctaatcactttaaaaattaaaaaaaaaaaaaaccaagggaaaacaagtaatctgaccatttctatcagtttaagttttatacaaatgtgtatgcattattgactgctgctgcattcattaattcatctttttgcttgcttacatattttttggcttactttatttattctgtcctcatactcactgtgtaactaaggatggcactgagctcccaatcgatccttctgcctccagcagtaaaggtggcatcgtccccgattcctgtgggggctgtggggagaagccagggccttcctttacatggtagccatgcagcctaccggctgagcaacatttccagtcccctatttattattttgaaagtcaaatttctattaatgttatatccatttctgcagcttactcattaagatcatggtatgaggctccatggtaatagtaatttgatttctgttcattatttacaatgttagtgcttaggtctgttcctgtcttgacttacttttcatggtttaattactcatgggcttttgttgagggatctgtttgaatgtgtaccagcacaattcccagcatacagtttgtgctcagtaaataaaaggtacaggaatattctccatatgctgtgaatattaaattataatcttcctcttaacttttaaccagcatacaggatgaaactagtgagaaaatatttcctagcattgcttttggataagcattcagtggctccgtgtgcaaagccgtctgcacagcttttctcttggtttggtgtctcttcgatcaccttttagctttacacaaaggttgttatcaaaacagagtacaaagaagtaaaaaatttctccccagtgccaagcagctgtagcctagaaaagaagcagacacaaggttcccacagcgtccatcttggctctgttgcatttccatccagaaaaagcagctctgttctctgcatggggtcaggaaccagatgggtgagatcctggggcttcgctgaggcagaggcagatagttcattttaaatactgttacaaatgattaatccgcatggtggtcaatgatcttcctcctcctcctcttcctcttcctcctctttaaatcagggactacataatggggctgtgactcagtgcttgtttaatgtgtatgaagccttgggttaaatcctcagtaactcataaagtgggtgttgtggtgtataccacaacttaccttgcatgccgagacataagcaggaggatcagaatttcaaggttatacttagctggctagcaagtttgaggctaatctgggttaaaagaacctgtctcaagacagacacccaccaaaacaattgtataatttattctgcttcatgacatatggatggtgcattttggtaatgtgtatatcaccccagatctttatgttcaaatcaaagcatcccatacagtagtttatttttctaaagtaataatgacggacatcagtcattatcagaacaagattggtttgccttttctgcctttccagtttgcttattgcttctttgtttcttgtcagcttgacacactgtagtgtgttattagagaagaggaaccacaattgagacaatgtcttcatcaggttagcctgtaggcaagtctgtgcgggcattttctttaatgattgatgtgggagggcctcccccactttggggttgctgcccctggggcaggtggtcctgcgttgtagcaggaagcaggcagcatgagcctggatgactgaggcagctggcggcattccttcctctctgctgtaattcctgccctgtgtcccttagagacggagcctttcctcctaagctccttttggccatggtgttttatcacagcaatagaaactctattaaagtttggaaataactttaggattaaaaaaatgtttagaaaacaagggatttttgaccaactgtatcacttgaagttttatttatttcatgtatgtgactttactgttgctgtcgtcagacacacaagaagagtgcatcggatcccattacagatggttgtgagccaccatgtggttgatgggaattgaactcaggacctctagaagagcagtcagtgctcttaaccactgagccatctctctagcctgtcacttgtagttttaaataggccgtctattcattattgtctattgctaggacattttatctctctcccactctctctctctctctctccctctctctctctctctctctctctcttgagagagaagggtatgtctgcaccttctgttttgctccctggtcatttatacgcatatcttaactttactaggcgaggagataggatctgcatttgtcttttatttttctaattttcactttttttggggtggtggtggtggtggtagactatagaggtaaggagtagcttgaaaatacgttgattaatgagacaactgagaaagaattcttcccattgcaagtccagaactaaccctttgccccttagctatacagaaaaaaaaattaaaaaaagaaaaaaaaaggagagtgtaatacactctacttttgggaatagggctgtcttaagagcatctcactccatcacttaacatcttccaaagaacacacacttttggctgtgagttttaaataattttgttgttggctttgggacatcttcatccttcttcctttaatgtaattgcatttgaactttgaccatttgcatacttttccctcctggtgctgtggacagacagttgatttaggggtgggagtttatgacccagctcagccatttagtagcttactcacctcaaacatgtaacttgacgtctgtttccttctctaaaatgagcagcaggaacaagaaaatctatgagcttcctttgaattaaaacctagagttctaatatgatttttttaaagctcagcataattggatttagtatcctttgtctactcaccttcttgagatctagggttagttgctatatgggattattttctcctactgtaataaattccctagccaggtttggcgtcacatgcttgtggtgctcaggagatggagataggaggattgcaagttcaagatcagcttgatatactagcaagaccccactcccatgccccccaggggctagtgatatgaggcttattcgtattgtttcatgactatattctactaatgattcgagctggtagctccaccactgagttgcacccatagtcctgaaggcttgcttgattcagtgttttagagttgtgaacatccaaaagtacggtgctagctctggcgaggaatccctgcctgtcacatcacagtacttagcactgcagtgggagtgtgcaccaaagggggaggtggtgtggagacacaggaagccagaggtcaggaggcgccagccttactcttttgtaacagtgattctcaggaacttatggaggccccagaagaacagcatatctctcttctgcgggcagcaccatctgagacttcctcctagcttctatatcttacagattctagcctctctcctgccacactggagaccatgctcttcctacacaggagccctttaaggacatgctaaactctattcacaccttacgagttatcactatcgattagacctaatgacaggttaatctgttgtaagttatagaggctatgcttttgccagtccttgaactcgggtatttgaggttcttattatcccgatctacatgtgagtcacagaattgtcaggtgattgaccatgtctctttccaacttttgttgttactcctagtgtctgttggaggcttggctcaccgaaaaggaagaggctttgaataaagttcaaaccagcaactttaaagaccagaaggaactaagtgtcagtgtccggcgtctggctgtaagtgtgtccctgtcggcatctgttgtaagcctgtgatgtgtagtgttttataactaagagttaatatacttgaatgaatacagattatagcttatttcccattactacatcgcttccagccatggtactgtaccaggagccttttattattgcatagagaatggcagaacacactgttggcgggattacaaatctacttgattatacttcccgaggaagataaactttcttgagagaaagaaaattatttgtggaagttggtcctgactcttcctcccagccccatgctcccagaaataagactcaggcaaaatatatttagatatcttggccatatagctagactcttctctgagtagactgtaacttagaaaaactccttttttttttttttttttttttttagacatggtttctctgtgtagctctggctgtcctggaactcactttgtagaccaggctggccttgaactcagaaatctgcctgcctctgcctcccaagtgctgggattaaaggtgtgtgccaccacgcccggctaactcatttattttaatccacattctgccatatggctggttacttgtgctcaggtaccagacttctgtcttctcacatcttcctctggcaaatctcccacctggctctatcccagaatcctttctcctcccgaatgccctacctcctatttcctgcctaagccttaggccatcagatttattattgacaggtgtcatgtccatatagacctaagatattctctatagttgttgtgtgataaatatttgacattctagatattgaaggaagacatggaaatgaagaggcagactctggatcaactgagtgagattggccaggatgtgggccaattactcagtaatcccaaggcatctaagaagatgaacagtgactctgaggagctaacacagagatgggattctctggttcagagactcgaagactcttctaaccaggtacgtttttgatttgggtagtatattataccatgaaaaaattgtgtgtacaggaacagaaaaatgcagtctgagatccaaagtgtgctttattaattgacaatacgaaagattgagccatcagtacaatgtggctgaactgtgaaaacatcatgatagaggaagccagtcatgcatgatagttatgaactatgaattgtgcaggacaggcagaacctggcaggtgctcagtggcctcgagcggtggtgattagggagtgggatgctgtgaacagatatcaaggttctatttgggctgattaagttgtcttggagtgaatgagaagacaagacagacacgggtatgggctattcaaagatagtacaagcttttattcagaagaaaagccctcagggtttctagtctgggaatgagagcacactgtctacttataggctagggtagttagctacaggatagaaagggattgatctgggcaaggatactagaatgttttcttttgtcctgtgctaaaaaaggttaaatggtgacatagaaaatgtcaaccagcatcttgcttgggcagccatcagtgcaggcccatggcatggccagggcaagaatctagaaaaacaagtgactataatttagaaacagagatgactttggttcgggcagttgtcattattcaagcagaatggaggagtattacaagctggcatagccatggctgatgttgacctaaagtctgtagccaatacccacaccaatacccactgcagtggacttttccctttgcttctgtgcagttctggctagtctcgaacctctaacctctgcctctcctaccaagtcctaggattacaggagggtgttaagttttataaagcagtataatcatcggcggggatatattggcaggcccatgctgaggtgtcttcctgaggagacaccatgcaacagacctagtataaagaagacttactgtgggggaagggagcagggacctggagaagcggcaacagaggtgtgagggcaaagaactgtggggctggggggagagaagggcagagagaaagagaagagagaggatacgtgggtacagggaaagaagatggagagagctgctagggtagcagccagtccctccttatatgcctggcttgctcccttctctctcacctggtggactttgacacaggctgttgctaggtagctgttgggcgaggcctaaaggaattgtcaataagccaacagagtgtggcaccatgcgtggcttgaactgtttatttttatagggagcgttttatgtgaataactctcagcagcggctttcatttaaagccaacgctgggcgtgacttgcctttcaggtgactcaggcggtagcgaagctcggcatgtcccagattccacagaaggacctattggagaccgttcatgtgagagaacaagggatggtgaagaagcccaagcaggaactgcctcctcctcccccaccaaagaagagacagattcacgtggacgtggaggccaagaaaaagtgagagatgtcccagcctcaggcctgcctgtaactcgcactaatcactaatcaaatgagagtttagacatgctcattattatgtaaattcagtcatgagctcagttactggctttgagtctctggaagattctgcctcccaggagctaagcagctaaattgccctgagggactttactcatcctctgctaaatttagagactggtgtggagtaacccttctgttatcaatccccatctgtttctcagaggacgattgttttggggtccggctcctgctttcttctttctttcatacctttaagacctgacagtttggctttggataaattccttattctttgtgaatctctttcctctgctcatcactgcaatagcagttcaggaagacaatgcatttttgtgacctcacgatctctgtctgtctgtctgtctctcctcctcttcttcctcttcttcctttcctttttatcccccccccccccaccaaacccatccatgtatttaggttttctttgataattccttttatcaggtttcttaatagatgctttctgttttgctgaaagagctcttttgggttaaaatgtcccttttatctaactgattcgaaagaaaactggagattgttagaagaatgagatttcagctgcattcactgggcctttgctgtgtcagagcctttaaaaaaattctctacctgtaggtctcgactcctttgggggtgtgtgtgtgtcatatcaaaaacccttcatatcagatatttacactaccatccataacagttgcaaatttataactatgaagtagcaaagaaataattttattgatggaggtgacggccacatgaggaactgtattaaaggatggcagcattaggaaggttgagaactgctgctttaaaatgtagtgtgttctaggcactggatctggtacgcctggtcacagtgagccttcggctcggcctcaagcttgctctcatgctccctcttgcagtgcgatcccagggttcagggacattggcagttattaggggcctgaataaaaagataagctttccttccataggatagctttattagaggaatcaggatgtggggcgtatctgatgattctccttttgaccctcagcctgttttctgcctcctaacggtgcctcatgcatgactggcgcacctgccgttgtgagcagcagcctttactttggccagagcagcaggcagagaaggagatgctgtcgatgtcaacattagcagcaatcttccatttcctgaactcttgttagctgctgggcgcatctggcactgtgtgtctccagggctggctttggaatagacagggtgtatcctgatgggaggctcatttaaacttgcctgtagtgaataatgagccttctgctgcaagagacaaaatgctgtgaccaaggtgacttcaacaactcattatcgtgtcgtatgacaagaaacagtccagaagtggcccagctgtggcgagaggatgcacttaagcagacttcccactgccgtccctgctattgttggcttggttgcttttcctcacagtgctttgtcttctcagcaaactgggtctccgatgtcaccagccaggattttgtcccttgcttgttcaagtttataagctgacggcaatggtactggaggtccagatgaaccgggtcatgtgtccttcccttatccccagtctatgcagtttgtacaaagtatagagaggggttgtgagtcatgagtcctgaccttcgagggtggattgaggcagacattcattactgaattaattcctcggcagaggcctgagtgcatgctgtccacggtagcagaaatctcatttgtaaattttttttatgccccatgtttgcctcagaacgtcctgtgtgctgtctttgtagagcccaggcatgcttttgtaggcagtagcagggtccgatggctgcccactgggagttccagtttcctagaacatggaagtagacagggatgcttaggtgttgcagaagctgacagtttcctaagatacggtgtgcacatcccaggagaaggcatggaccagagcagagcacaaggctggaagcccaagctccgagccccaggctttcttgtgacctgctgtgggtcctgggcatccgaggagattctccgtgtgtgtgcagtgctggctcttctgcatccatgcagtgtcctttccctgttaaccttggctatgaaggtttccagtcttcctctctgccagctggtttttctgctgtgtgaacctctcagtcttttcttttttttccccctgagacagggtttctctgtatagccttggctgtcctggaactcactctgtagaccaggctggccttgaacctctcagtcttaatgcagttcacttcccccttattctccccaacctcctctcctcaaaatggtccctcacgaatgtttgaggttagctctcacagtcacttccattgtcctaaagacgaggctctccttagctattccttgtatgacataattttcagacccttttgtgtattcagttagctgtaaaaacggtcatgaacttgtgttggactccacagacaattgagagccctaaattacctaattacttattcttggtagtcaattttattttgttctctttttttttttttttttttttcgtttcttttaaaatctgctcaggtcaggcatttccagctatctggttatcttgtactggggtcaatgtgtcttgctcatttctcttatctcagagagaaactgtggacatctggattctggttacttagctagagcatcacacactcttatgttgaagtaaaatttatcgaccctcagatgtctgaaataaaaggggtttaatgagtggctcagggacaaattctgaagcctacaaaagcaaaagggttcagtagatggaaatgggcacttgggaactaatagcccaaaacctctgtgtgtgtgtgtgtgtgtgtgtgtgtgtgtgtctgtctgtctgtctgtctgtctgtgcatggttggttatatggatgtttgtgagtataggcatatgtgtgtgaatgcaggtttatgtgtgagtgtgattatgtggatgtttgtgagtgagagcaggtatgtgtgtatggttatgtggatgctttgtgtgagtacaggtatatgtgtgtgtgtgtgtgaatacaggtttgtgtgagtgtggttatgtaggtgtgggtgtggatgtgtggggttatgtggatgcttgtgtgtgagtacaggtgtgtgtgtgtgtgtgtgtgtgtgtgtgtgtgtctgtctgtctgtctggttatgtggatgtttatgtgtgagtatagagtgtgcatatatggttatgtagatgtttgtgtgtgagcacagatgtgatatgtatacgtgagtacaggtttgtgtgtgagtgtggttatgtggatgtttgtgtctgtgagtacagggatctctctctctctctctctctctctctctctctctctctctctctctctctctctctctctggattccaaaggtttccttcctcaggcatggtccccctggcttatttgtcagtgagcctcaggaatttggctgactctgcctgcctccacagctctgggattaaaagcatgccacccagccagacttttaaaatgcaggaatgacttagaagtcagatcttgcagggcaaatgctttacctacagagccatccctctctgcagtcctcagagcgctttgtcctagggaagactagcgaaggaagagtcagttgagtacattgtgtttacctggccatatttagaggtgagactgcaaggtgctgaagggcttggtctgagtggctgggtgcagagtccctaagaagcattgctgcttcttgctcactagtctgggacatttatatattaacaggttgtggtgcctggggtacagccaccacagatgccaggtcagttttaacttgctttcaggaatgtggaactatcatgttagttctggctggtagctattaattaattcccttaactcttgcctcctctgatttagatttgagatattgtagaaaatgccttttaaaatcacatattacacagaaaacttactcagaatctactagaaacacattaagagctgctttccagaggaaccttcaaatacctcttctcagcttatgatgctgagtcacgccagggtaagggggcagctgcatggactgcctctgtttgaatagctcttgcttcgtttattagtatggggtccattattcaaaacccgtatgagctcagttgcttcgactctaacaggatattcaaaagtattttcagagagagtggtgaggattctttgcgttaacgatagacatggaaggtttaaccaagggcctggtctctggtcacctttcagaaaactgtggttttcacctgctttgggatcccatgtccagcctgcccactcttccccctcccattaccgctcgctgagttcctcttgtgttctatctgtggtggtcttttctgtgcagtcttgggttctggccccacagtgagtgactggacactatgaacagactcttatcagttctgtgcttaacacagctgatgactgctctttgtttaaatccatcatctatcacccagggctttattggcccctttgactcttggccacatcattatttcgccttccctcgcatcactctctataccagacacacctatttgtagctggcaaaatatggcctctatttccgttgctttctctttgcaagggaagctgtcaaacacagccacacttatgccctgagaccatgctttccacggatgggttaggagtcagtccttggcagtcctgggatttacctagcatatacttttcttattacttgtcaatttcagttgcttcctgatgacttgaggcccccgaaaggctgagataggtctggttaactatgtattgagcagcagaggatagttttataaatgtttgtacttgtcctttttctgttatcatctaactaaatctgttttttgttgtctacaatagcttataaaaatacaaatgattcccaattaagtaaaaaaaaaataattattttattagccctataatgttttcacttttaattgtaaaagtattatgggtggttgctctattttggggcagagtttgaatatccttgcctggtgggcattcaggttggtctttattgggccaaggcaacactggaagctgaccagtgacagaggcaaatgtctccatcttgaccaggtttgatgctataagtacagagctgctgaactggattttgaaatcaaagactgccattcagaacacagagatgaaagaatataagaagtcgcaggagacctcaggaatgaaaaagaaattgaaggtaaaatatacaatgaatatgccaggaagtaaaataattcatcaggctaattttactattggcacagagatgtgccagggtccagaagctattgcaaaatacatgtagccacagatggcttttagagcttcaccgtaaacatcagatcaccacatgtaggagaaattaaaaatgttttccccttttcctccttaatcgttgagttgtatatacagtcatcattattgccctctatgtagatttaaatttacatggtctggtacatagtaacttaggactttgtattgtttcagagatattctgcccttgtatctaacaaagcatttggcgtattaaaatttcctcaaaatatttcctttaaacaatacagctttttttaaaaagtcgatcttagaccaaaaatgttaattttaattatttccccttgataatgaactcataattacagaacatataatcttcccttctaaaagaatctaaagttgatattcactgtcatcattttggaattttctttttcagacgtactgattctccgagtgctagagagtggccaggaattgcgtagttttttcattacagtactttgtagataaactttgaaatacctaaagaaaagttaagagggcacaaaatatgaggttttaaaataacatcagcgttgcatcgagaagggatgctttcagtgttttatatttggtctttgtttccagggattagagaaagaacagaaggaaaatctgccccgactggacgaactgaatcaaaccggacaaaccctccgggagcaaatgggaaaaggtgaggccctgcagggcttttttttccctctcagattattttagaaggtcacacttaatatttgcagcttaacacacaaaacatttaatacacaaagatagaaaaaagatctggttttcaatttttttttgaggcagcagaatctttcaaaaactgaaatcttatattgaagctttttattaaaaacagataaaatcaaagtcgttctgctcccacttgggggtcagaaaactagaaaccttgaaaacctcagcagagcaattaaaatccaacagtgcacaagattgtaaaacctcacctttggggttacatactctgaatttttcttatacatgagggcactgagagaaatgtttatgctggcaatgtcttagatatgaagtcgccttaaggtaaacttattctagtttcattctgctgctgtgacaatcaccatgactcagagcagctcgggaagaaccagttcgtttcagcttacaggtcccagtccatcactgagggaagtcagggtgggaactcaagcatctgaaagcagaaaccatggaggatgctgcttgttggctgcctggtccttacagcctaggacctcctgcctaaggaatggtgttgcccacagtgggctggactcgtctacatttctttttcttttctttttttttttttttcttttttttttttttttgagacagagtatctctgtgtagccctggctgtcctggcactcactttgtagaccaggctggcctcgaactcaggaatttgtctgcctctgcctcccgagtgctgggattaaaggcttgtgccgccaccaccgccagcctgttctatatttcttaatgatcaagacaatggctactgtgtgatcctcagtctaggatgtcagatgatgctaggctgtgtcagatggacaattacagctatctaggacacttattaatgtttgatatttggtcacgttcggaggatcacattaatatactctagaaacatttttctacttaaatttgatgttacttgtattcaaaaaattttcaagcagcaaagacccttgctcctcactaaagccttgcatagacacagagaaacctaaaattagtattttctcttctgtggctgtttagtttggcatatggtttttttctttggtggtactggacctttcttccttccctcttaagaaaagatgtggcaggctgagatgtcaaaggctggggcatgggttgcagtcgggtgagattcgcatgctgctttaggcccgggttgaagggcagaaactgtagcgggcacacgccagtaggtgcacataggcaggagcaggtaggactggccaggctgactgcagaaactccctccttgagaactctagagggaggacaccacgaagcacacttcctgtgcacctgttccttcttctaaaaatacttaggttgcctgtcagatggttgggtcttagctccgcctgcatggaaatcatggatcggcaagggaagggctagtcttctgtaggcagctttagcatctgttcacagcagtgtatggcctcagcaggcaggagcgacatcaggcagtgctctctgatattagccttcccacagtgggactcttctataagcatcagagttattgcttaggcctaggaagtggggagccttcatcccaagagagtggctggctttgtttcttgtaagtggacatagctgtagggattcctcaaccttgggcaatggccaatattatagcttctgtacctctggtgcctaacactcttggctctaaaggcttgacagctttctgggtctattctgaggactgatgcttgtagtttcttcttaatctctctctctctctctctctctctctctctctctctctctctctctctctctctctctctctccattccctcctcccctctctctttccccttcccttcttccctccctccctcttcctccctctcctcctccctctaccctctcttgcctccaatttatttccaccttctctcctaccctgtctattatctcacatccactgcattgcagctgtgtctgtggctacatccccattgctgctgctcaggacctggctacctcagcctttgtgccactgtcagtagaggctctgccccttctgcagcttggcctgctaattgctctggtctgtcttgttgtcagatgtctatttcgaagtttagcctactagtactgctcagttctgtattccctctctctatcatctctttttctaaaccccgttcctccctttctgccaacacctcccctgaactcacgtctgtactagggatatattgcattcaagactttgcacacataagtggtctcccctgtctttcctgaagctgtcaggcatccagtccccatcccttggccactgctggtctggttcagggctgctggctttactctccagctgtcacttcttgctgtctctgttgctcctgtctttctggcatgtgctcagctcatccacctgacagtagacaataaaagaccatacaggaaaagccttttctggacctaatgttacatcctgggagggtgtaagagtatgttttccagctagttccccaagtgagccaaaccgtcctatcatgtagccagagaaagggtatttgtatcaattgcagcaaacctcaaaaataaataaaggttgtgcctataccaagtgttctatttgtaccaatcacattgttccatttgtaacaatcacattagtgttttgaggccaaggaggaaaggccaatgtgcgtggaaatgtgtgcagtgtcatctactgtttgctgaagctagcaaaatgtgtagttcaaactctcatggttggtgctgcaccttcaggagttgggcctgtgttgcagccttgactgtcatgtgcgtcccctaaggcacctgtggggccatcattccgcgtggctgaggccagctgaagggcagcctgcctggccattttattgatagtcccctggcttgcagcagtcaggagattctgggagtatcatttggggagttaggtcaccccttctgtcacatttttatttatgggaaaaccaacaacagaaggaatgcttatgataggaacttactaacactcatgtcagctttaatggtatttaagagctcttcacatatttattcaactcctgcccagggagaggtgggacccactcgcctgcctttgaaagtgttctgtgcctggctctgcccttgatcagagctataaacaaccaaggcacaatgtggcagattagttataccaaatctttaaaccagtagtttttttttacatctttaactttgtgtgtgtgtgaatcattttgcaattactgcttttggaatgaaattttctttatgatttatttctattgtatgtgcttaagtattgccagcatgtaagtaagtatttgaccacgccaaagcaccatcatatgcatgtccattgttcacacagttgctaagaaaatggtgctttttcttgtccatgactccgttagcagtgatacttgcacatggactgtggtgtgaatgccttgcttaggtttaatgtcctcttagcagcttgctggtggaagtgcccttgaacagctgatgtgggtggtacctttctaccatggtgtgcatgtttgtatctctgattcttaggagatgtggtgtgacacaaaaccttccaaatttgtattgctggtgagacaggggtggcttctcagtttccatgacattttcctttcatgttgggtttccatgactgtggatgttgatcatatatgttcacagagaagactctgcactcctactcatatcctgaaggtgttgagtctctcctttcagcatgtgtgtctgccaaatagagttggttgctgtagtacaatcaatttaatcttatccccaactagcttacaaatgaatgagactcagagtctggttattttatttagctttgacaattcttggggggggggcacctataatctgatcttctgactgctggcctggctacctccccagaggtgtaccccagatacctactcttactcctggatctgggctcacggcccccctagtctcgtctctcatggccccttctctgctctccctcctctttccagttctcccatgctcaaccaggtaacttaaaaacctgcctacctctgatctctccagtcagtggctgtagccccttatattcaaccagtagttttaagttaaggaacaaggtctacacaagaaaagctggtagttcacgggtgggcctaggctttctggtaaagaatctagcattacagtgcatagcaacagaccaaacctccacggattgccacttttctataccacctctcactcacttaacaaaagatttaatgatagtttatagcactacaaagggtatggaaagtgttattgttatagataatttttttaaatcaattctaaggacattgcatagctttctaaaatttgagaaaaaaaatttaagcttgtcagtggctggaaagatagctctgtgggtaacgctttttgccaccaaacctaatgacttagatccttccctgggagccacacagtagaaagagagacataattccagcgctttgtcatctgacctccatgtgcatgccttggcatgtggcagcccccccaatacaaaataagtaaataaatctgggagcttgtaagagtaacataatagaataacattttttgagctgtgtctccagagtagctaccattatcattactttggcattgtttgtatttactcatatataatatttatataatataataataatatgtttatatttactcatatgtgttcagagtgcttcgtaggcttcttgatgcttcctgaacctggcatctagtttaatgttcttacatgtacccatttgcttgcaggcaaagggactcctgtcatcttttgtcatcctagacttcagccagctctgagttctgctagtcttctgcttcattttcctatggcagaaggcgtatattctgatgtctgagctctgcacaaattcaggcatttgagttgatttgcctgcatcagattataagttagcagagtgttacagtgtcggggatggagacatggtctacagaagaggaactagtggatgctttatagatataccttatgagatagccatatcacctctgaactcttagcattcctaactccccttaggtcaaggagttaaagcatatccagttattagtacatcataatggtgtaaaatagtcatatctaagggtatgacctaagggtatgacctaagggtatgactgaaaggtatgacctcagggtatgacctaagggtatgacctcagggtatggcctaagggtatgacctaaggatatggcctaagggtatgactgaaaggtatgacctaagggtatgactgaaaggtatgacctcagggtatgacctaagggtatggcctaagggtatgatctaaggatatggcctaagggtatgactgaaaggtatggcctaagggtatgaccattttacgtaacattgcctaatctttcactgtgttagatgtctaggaccaattctaagccactttggtattactggatgaagtgctttgatgcacctggacctttttgtttccgtagaaggcctttccactgaagaagtaaacgatgttctggaaagggtttcgttggagtggaagatgatatctcagcagctagaagatctgggaaggaagatccagctgcaggaagatataaatgcttattttaagcagcttgatgccattgaggagaccatcaaggagaaggaagagtggctgaggggcacacccatttctgaatcgccccggcagcccttgccaggcttaaaggattcttgccaggtagggtgagaaatggctgcactataggactgtagagcctttctgggctgagtctcttatataaaaagagaagatatcattcagtgtgtctggtgagtgggctgtgtgtgtgtgtgtgtgtgtgtgtgtgtgtgtgtgtgtgtgtggggtgtgcatctctactcatggagacctttctgggttgaatctcatatatgaagaggaaatatcattcagtatatgtggtgaatgatgcatgtgtgtgtgtgagcacacatatctctactcatggatgccagaagaggtcagaggaggacattaggtgccctgccctaccacactctaccttattccttgagatacggtctttcactgaacctggagcctggtgtctagtaagtcccagctgccctcctgtcactgccctcccttaattccagggtcgcagcaggtggtgatacccacattttcacatgggttctgggtatccagactcaggtctacatgattgcttagcaagcgctctcacccactgagccgtatctgtagcccgagaggctgtatctcctaaaaggcaaaaggtctcgaaatctgaagagaaagcagagagcgggggagcatggatctggtatcatgagctttgtctttgcttctttcataactgtttatgggaacgctcgtattcatggagtgaagtgaccgtattttctcttcctcagagggaactgacagatctccttggccttcaccccagaattgagacgctgtgtgcaagctgttcagccctgaagtctcagccctgtgtcccaggttttgtccagcagggttttgacgaccttcgacatcattaccaggctgtgcggaaggctttagaggaataccaacaacaactagaaaatggtaaatattggctctcctctgctgtgtgtgtgtgtctgtctgtctgtctgtctgtctttctgtctctgtttctctgtctctgttcctctggttctcctcttagttttccttaaatctaaaattactcccaatatttccacctttagtgtgtcttgagtttcattctggcttcatgctttcttccctgcatccctgtggcttgaagtattataatacattcagacctggccaggtggtggtggcacaaacctttaattgcagcacttgggaggcaggggcaggggaagcagcagaggcagagggataggcaatctgagttcgaggccagcctggtctatagagtgagttccgggagagccagggctacacagagaaaccctgtctcaacaacatccctcccccaaacaaacaaacaaacaaacaaacaaccacccaacaaaccaagccagcttggcatgctgtaaaactgcatgagtaggatatagtgacttctgggagactttgctttcttttggtggtgatgggttgaaccccagtgccccatgcttgctaggcacatgatttgcactccagcccttaaggagaatttaatgggagaaaccactttgttctcatcaaacaaaaacatcatcgatttctgtttgctcccagtggttaaggtcttagtagccccactcgatccttgaaagggatcatgttgcttttccagaatttgaacaaaattgagcaaggtagaattggagacagtggaatgaagctggttcgggtagctggatttggaaagcttgtatgtcgctttctgtgtctcgtcagctgctgccctgggttgtcatgtgccatgtgctctctgtgctctgactgtgacctccaccatgttagctcccgtacagcatgtacaggcattaggaaggcatgcatgttagacaaaggcaccatgttacttttctcttgactgtgcatttggacttcatgcatttcactcatggaaatctgttaacttagtgtgacattaaaaaccagagaagatgtctttcccggctgacccccgcaaaccaagctttcccttatgacgaggatcaggagtgggcagttgaactcatgctgctaattggtttcacctcttggtgcttcacatttcagctcacttcctctttggtacaaatgctgattgtctgggatttgtacagaggcacagagggatactctgtgttagctggctgttgccagtcacccctgtttcttacggtcttagggttcccatgtagtttgtgtacactcatgggatttcaggaaggctggtggcagggtcttcgcttctgtttattctttgggtatcatttgggggaggggaggttgtgtgagacaaaaacgaatgttgtccttcaagcttcatagagacatttcagcatgatcaaatggagaaaaatgctagcgagttaatagttcaaacaccagcctcgagaggaatgaagccacggtctgtctgtctgaaatgccagagggatggctggtcttgttaagcaacagagagccttttcagttgtaatcaggggatctaatttattatctactggagtctccttattatatacagaagattaatggtgcagtcgataacagtagtgaagtcctagcgctgttttccctaagcaagcatgttcaattgtcagagctgaagagccagcctggacccgcgtatttggacacactgaataccctgaaaaaaatgctaagcgagtcagaaaaggcggcccaggcctctctgaatgccctgaacgatcccatagcggtggagcaggccctgcaggagaaaaaggtaagctgtccttgggagcttggccatttctgagagttcctgttatgtatttgaagtggtttttcagtgattaaaaaaaatgaccatttttgatgaagtcttttaagattgttaaaaatttgttacaaaaattgcagagtaaatgtaatttattttattttttgtttattatttattattagtattattgtagaggtgggtgtgtgctgagtcagaggtgggtgtgtgctgagtcctgaggacgactttggcaacttggttttctcttccactgtgaattccagggggagcgttcattcaatcttaagtcttgtgtggctgccatcttcatctgtggagtcaatctgcaggcctaagaatttataattttaaacttaattaccttaaataatttatttgaggtccagaaagatattaagtgttactgggaaacatttacttttttaaatcatttaaataaaattctaaacctgttcctaatctgctagatatatctcctaaaataatgtgaggtgtattaggtgacctgatttctttctttctttttcctctttctctttctttttttcctctctctctttttttcttttcttttcttttcttttcttttcttttcttttcttttcttttttttcttttttttttttttttgagacaagagttttactctgtaatacacactggctgagaattgagtgcagtcttcctgcctcagcctcccacattctgggagccacttaaattatattgactaaaccactctcctgcgtccagtggcctgaaggctcaatgccaatgtttctccactgtgaccctgtaacacagttcctcatgatgtggtgacctccaaccatcgtattattttcaatgctacctcataactccaattttgctactggaatgaatcataatgtaaatcttcgatatgcaaaatatatgatatgcaggccctgtgaaagggttgttagacccctccaaaggagtctcgcccctcagattgagaaacactgttctatactacggtacctgatagaaaagaccaactgccgaccttgggctcttgttctacactgtgtgtgctgttacagggtttaatgtacagaatccatgatgccacacctacttatgagaaaagaaagatttttatttttaagtaagataccctcttctccatatatatgtatatatatgttactacatctgtgctaatacatatgtacattgttgtggatggttttaatctcttgacactttcgtaggcccttgatgaaacccttgagaatcagaaacatacgttacataagctttcagaagaaacgaagactttggagaaaaatatgcttcctgatgtggggaaaatgtataaacaagaatttgatgatgtccaaggcagatggaataaagtaaagaccaaggtttccagagacttacacttgctcgaggaaatcacccccagactccgagattttgaggtaaatcgagaggccaatcgataggagtttaggcttgtttcagggcacacagcgataatcatgcaagactgggatatctgctttctgagttctttgctttcttccttgtcccacgtttgttatatgcttaagttgggattcataatttgcttatcagagatattttaatgtgctggcaagcacatgtatttcttttgccttatagagagaaggcttcttggtagaggtgtacaagaccttgttgaggatgtagcttagtagcggttaagatagactttcatctggggatctgcatggccctatgaaccagtgctcaaagtacagcggtgactagttagagtggagcaggttaacctagttggaggcagagaatggagtcggggacacaggggcaggctctcacatgtcctaggctggccttaaaccatgctatctagtcaaggatagccttgaacttctgacccttcagtcacctcaagtgctgagagtgcaggtgtgtgtgccactgtgcctgccttttttttttttttttttttttttgagacagggtttttctgtgcagccctggctgtcctggaactcactttgtagaccaggctggcctcgaactcaggaatctgcctgcctctgcctcccaagtactgggatcaaaggtgtgcaccaccaccgcctgtgcctgccttttaaacctgtggcagaggttaacttcagggtcttatcatgctaagtaggcactctgccacacagcttcgagtgttccaactacaagtgagaggcttttacaaccttctgctgcattcacagaacatacatattacaatggtatgaatgagagttatacttgtctgtgattgtaacattttttgatgatggtcacattgacctatcagtgattctcaaccagcagtgtttttgattttcccctcaccctaagatatgtgttagtctagagacatctttggttgtcactgacatggcaataggggtgaggtagagcagtgacaaacagaggcttagtagccagggatgtagctagctgttttatggcacccaggttggccctcatagaggcagaactgtttagtcccaaatgtcagagttcaaggttgacccatgctgtgtgaactgattttatattttcaaatttaaatttagttaggggaattcatgagtgactcctgaaaagtttattttcgggtgggttagatgtatgtgttttagctgctttcctgatgctgggataaactattctgactaaagaatctcggggtgggaggtgtttacacttcatgatcacggcctgttgctatggggagtcagggaaggaactgaagtaggagccgtggaggaacttgctgcttgctggcttgctctcagacctatgcttgcctatcttttttatacagtcctagatcatctgcctcgagaatggtgccatccacatgtctgggtcctctcacgtctaagtcaattagttaacaagcaagagtgttccccacagacaggcccataggtcaatttgatctgggcagtccctcagttgagactcattgactcttggctgagacaagttgacattttaaaattaaatgggatggtgtgccagtatttgaatatggcacctttagtggccagtttgatacacacacacacacacacacacacacacaaacacacacacatacacacacaccatacacacacatacacacacaaacacacacatatccatcaaacacgtggatctctattcaactatttggtattacagtagcagactttaacatcttgttattttctgtttttctttggtgggtcatcagcaaggttggtgatagtatttgtatttattttttaattgtgtaacttcatgcatgtaacacatgtaagtttttgtttttgtttttcgagacagggtttctctgtgtagctctggctgtcctggaactcactttgtagaccaggctagagtcgaactcagaaatccgactgcctctgcctcccaagtgctgggattaaaggcatgcaccaccaacacccggcgtaacacatgtatgacttcaatgctaaaggccacgcttgctctcttgtttcaaacgaattgcttgttaattcactactcagaattcatgtgggaaaacttcaaagtttcttcataaagttacaagataattgtagtaaacactcactcacaggataacttttttctttttccagtgtcctgatgcatgttttagtttttaagctctattctttaaagccgtgagcacagtgggtattagattcactgccaatttatggagtttctttgggataaggtagtggaattgtttgcttaatttaattaaatcaattagttgattacttgagactgggcgtcattatgtagatgaactccccttgaggatctcgctggtctctagcaaacagagatccacctacttctgcttccaaagtgctgggattaaaggtgcacaggcacctactgagcctggtggaaatcagaagctgctgattttaaaatgcgtttttaatcctatatgtgatgcatgaagactgctattgtgcagatactgaataatataggaatactcattgccaacagtattcttagtcccagttctatgtcccgtcctggcaggcttgtattcacagtgaatgtttgcagaatttccatgtacatacagtccgcacatactactaattccaatctggggtgttttgtttgtttgtttgtttgtttgtttgtttgtttgtttgttttttctgtactatagaatacactactgtagatcctgatgagggattgttaagataaaaggaaagtccatttccccaggttccaaaaggcagaatggacaggtggctatctgtggcgtctgttagcatacctaagcacaggcaggcctttgggctccctcagcatcagaagtaccagctacacatttcaaagtccatgctagcatcttggtgtctcccacttcctttcttactgtgactccctctagctaagaggcttcctttccaccagctacacattctgtttgtttgtttgtttatttatttaaattaattattttatctatttacatcccaaatgttccccctccccctcccagagttcttactcccattccccttccccttcttgtctaagaggttgcctcccacccctgcagacccccttcccaggggcatcaagtctctgcaggatcaggtgcaccttctcccactgaggccagacaaggcagtcctctgctacatacatgccgcaggcctggaccagcctgtgcttgctctttggttggtggctcagtctctaggagctccctgggattcaggttgacacattctctttataacccaaccatttcagctacacttattcttttgcccactccctatcttctgtgttaacctacccgccccacccccacccccttgtgcttctgtttctctcatggccatgttcagtctgctggccatgtttagtcaactactgtctctctcctctctctgctctggactcttccagatacttctggctgtgtgttctctctctctctctccctctccccctccctccctctccctctccccctccctccctccctccctccctccctccctctccccctccctccctcccttcctcttcccctccctctctctctccctcttatctcataaacaccattcccttatgcatactaagaagcagtcatgttgtcagtttatatgtgtggtgctgaaatctgggaggagcacagttggacctctttccaaaccacactgttgatttaactctggtaagatatggatcatttatttctgctggcttctgcctcccaccatattcaactctgaattccaggttctacctcctgggctgctgcttttctccagctgcttcactccccaggtgccctcggctccctcctaaagattattggaatcctccctctgacagagttcctgtttgtgacactttcccctccttttctaatctttccctcctcagcctcagagacattccattctgtcttgctgcaaatggtctcagtccaactcagttaatggccaaagatggcgcattagatttccaaattctcacagaccgtagcaagttctctcacttcacgaacaaatgctccccaaatctcttaactctaaactctctgtgctctatataaaccttcccttaaccatccatggagtggtcataccatcagtttatacggacatttcaatacctaatagagtgcaaagcttagaaagtgactcctcctgctcagaatgaagtctttcaagagtctatagcacttttagaagctgagttaatcgtggtggtgcttagcttccatcctccagccctgggatatttgcaagaagagtccccaggtttgtgtctgtggtcatagttgcctcttagtttcttggcatttgttgacatttccgttgtctttacagctaattccttttgtacaggctaaggttagactagcccgctattgtctcccacagtgctaggcacaaacatggacttaaagtctgttctgtgctttgcttcacaatccatcacctcccttcctggtagcaagacatttgaaaaacatgaaacaggcatttttttcttattgctttcggttatgaatcatgagtacaaaataaaatccaaagaggccccttcttctctgattctttctctcacacaggcagtaatatcttcggttattatggactgtgatatgttttatattatttcctttcccctactcaagatcctacagtgtgggaatacctggaacattaccagcatgtctgcaagtgcccactaaacctagttttgcctcttggctctgccctccactttataacagttccaactcccgattcccagcagttaccttggaaattcatcttcccactgaagcaagggatggtctggttatcgtcatcagagtaaaatgttcacactttatcacacagtccctgccctttcttcttctagcttgcctattgtccccactgtgagtggcatcaagttgggagagaatcatgggtcccaaaggactaccctggactgtattgccttcctgtggacatgacacacctacttgttggaatattatgtttccctggctgatttattttttaatgtgtacagtagtttttttttaaagctttattattttatttattgtatatgagtgctcaaatgccattacaaatggcaaccaccatgtggttgctgggagagcaactatgctcctaaccactgagctacctcttcagccccacccactacccccacccaggctgagtctctaagaacaaacttcatggccagtcaccagtcttgctcagcaccaaagtacagcctgaaccttcctcaccttttcatgctcccatccacaccctgtggagttttatcaacttagagctctgtgtttctcctcccctcccagggtatgagctctttgaagatagaactctgcggggtgcccagcaagtaagagggggtgaatggcagtgatcagaatgactcactcagtaggtgtgactctatcaggtagccttccccctctctagtgagcagtctcagacccacttatcctcaaagatcacacagccctctgcttgttctcttccttcagttgctcaaagtcaaggacactcaccaaaccaaggtgttctgccccaggatgctgaaaagacatgtggggacggggccattgaagacacaggatttgaaattattttggaagtatttcagggtcaagataaggaagacgaacatcccgtatttagctactttagtctttctagagaatacaagcctgatatagtaattaaaatactgtcccctccccccatcatttttactcattacaggaaacaatgggccattccacaccttggatttagtgacacaggtttagatgtgttgatgtggtggcaatgttattcttggccttcctctctgtgacagaacaccgtttttataacagtcttttgagtagggttatggtatccttgaaaccccaggtagtgtctgttacaggctccagaatgtcaccaaactgagcaaattaggaagctctttacattaaattcctatgccaactctattttcaaagctggtttgtccctgtcccaggcagaaattagcagcttgaggatccacatacattccagctgatgggggagcaggaaagcaaaaatgccagctatgtggctgtagtccagaatgaggggctgcagtgcaccctcgagtctcaggctctcctgtccagagcttccaagctttcaaatgcttctatctccagctcaggaggcgggcagggtaaggtgcaaagggattgtttcattgaccctacatttctcctctgtgacctgcccctgggtgttgcccgctcaagaagttttctggagggatggatggtcaaggtttttaaacattttccacattccaaaggagaatctttggtattttaaggtcctctaaataaccatgttattagcaatttcatcgtacttgaatatttatgagtaaaaatgagaatgagaaatgattactgtcttagatgaggaccgattaattttttttgcagacatttttattagaaatttactggcaatggtgtgtgtgtatgtgtcagagagacagagacgggtagacagggacagacacatacagacacagacacagaaagacagatagacagagaagatgtgtgtgcttatgagaatatgtgtggaggccagaggccagatgactgtatttgcactgttttttaaaacaaggtctctgggacctggggctcccaggttaggctacattgactggccagtgaaccccgggaatctcctagcttcccaggaattgtaccttttaccagcatgtcggttctgcatgtcagtctcaggtccccatgcatgccaggaaagcagtttactgactgagccacctcccgagcttctcctgggaactttaaaccagtttatttagcagaagagaagttccttaaagaactttgtgcgcgtacatgtgtgtgtattcttgtgtttgttcagcaagttggatagaggcaaagaaaccattgctgttgtagactgtagactcctaagcgctttaaagatttatttattttatgtatatgagtacgctgtagctattttcagatgcaccagaagaggacatcagatcccattacagatggttgtgagccatcatgtggttgctgggatttgaactcaggacctctagaagagcagtcagggctctaaatggctgagccagctctccagtcccccctaagctctttagtggtgtggtttttaaatggctagagagattctcttgtttttgtgaattctttcatgttctttgggacttagctgaggaactaatgtgagagccagagtttgtaagttttagtgactgtacataagagatccatgaagccccttgtccagggacagatggagaaatgctggagactgatttttctataagataacaagccacatgttctgacttcccttaacaaatttgttccacctgactgcaccagatgtgtttgatcactcagaggcaggcaggagggaccctggcaggaagtgcaccagcgtgtatgcttacctctgattggatctggtgagaaatatgcagccttgtaggtttgcttggaaagttgtagtggaatgtgactccatgtccgatgatccctggaatggacctgaccagagtccttcatcctggccagtatttctttaacgcttgcttcgaatttggttgaaaactgttctagtggtcttagtcttgtaccgtgcattaccactgactacagatgagctggctcgtggtatcgaccggcagtttctgctacaggaacatgagacgattttccttccagggaaaaatagatagtctggggagtgtgaaagaggagcgtggagctgggtctctgcaccctctgcaggctggtggtggctggtcttcagtagtgaccccttgcttcatagtgtggctacagggcggtgtgtctactaaatctgcccctgcaaggcattttcaaagtttggactggttcccgtttccttgactttttttctgctgagctctttaactatgcccatcagatatagcacgattgagctttcagctggccattttccagggactttaaaatagttataggactgaacaaatgttaatgctgacagcaataaaaaaggacaacaacaacaaaacaacaaccaactacctgatttttagcaaacacaacttcactgtggcattcctgggcatctctgacaagatctaagttctaggatttggaagcattggctctctaacgaggtcctcattgttaatagtgaggcagatgctttcgtgggtgctaagtgtatgttgcatgcattcgtgtggcgatctctgtcccaacactgtctgtgatttttcagaacaattaaacacagttgttattgttgttattctggttttacaggtgagcaactgaggtgccaaaacagaattagtttcttacagccatgctgttagctggtgagctcggcgtctccccatcatagggtacagggattatatgtcagattttctgtagtgagaagcagaatgcctgtttgttgctccgtctctgatatttctgtggcttgtgtgtgtgtgtgtctgctacattctcctttcttttttttttcctcagtgaaactgagagcaagaaggaacgggtgttcctgggctgtgtgccctcaccggtgtctggggttgtctgaggcgaggaagaggtgactgagcccctaaaacttcctctcattccccagtgatgggttaaagctgtctattttagtcagaggtgactgtgactattagccctcttggggtatgaggcacctctatgtgttactgaaaaatcttagctgtgaaactgttttcctctttcaaaattagctttgatggatttcctagttcctcagaaatactatgttatttaggagttcagaatggagattaacaatgcaatggggtaagcaggcaattttaaaaggcttgtttcatggaacaagattttatttttagtgatttatttttaaatcttatgtgcctatctgtgaacttgtacatctgtacttgtaacatgggcatgcggtacctatggggaccagaagagggcgctagatcttctggagttggaattcaagacagttatgcattgtcttgggggtgctgagaacagaaccctgcttctctgtaagagtagtgactgttcctgtctgctggggtatccctccagccccacttctatttttattagcatttattaattataaacaatgggcgccatgatttcacttacaaatcctaacactcaaaagcaagaaacccaattgaaaccaaccaaccaaccaagcggacccaaaccatgtacccaatagaaaattgtgtttctatgtccactttccaagtagaggaaagttaggaagagaagttggtaggaaagtggaaaggttaaaagttctaattattctgttggcttgttgctgatctattttttaaacttctgttgtcagcataataaaacaaaatttggtatttataatgatcaagttctatagctattctatccatgttaagcaatgtttggtaggggaagcttattttgaggtaaatactgagaacactggggttttagtcttcatgttgctcctgatatatttaagaacaaacaagtttaacccaaaagaatcattggacaaattcacgataagaaaaacctaaaatggttttaggtggtattttataggtataacctattttatagatgtaacttgccatagttgtatgtctttacgattcattccagcttcataagaatattaatagttggttttgtttggtatattataggaatataaaatattttttgttgtctccagagtacatggatcagaatggtttgtgcattacccggctatattgccctgtaaatgtcacaaaagaaggaatatttagccttcccaggactagggagacacatggtggtcactttcgaattaaccattcaggtttatttctatttctaggcgtgatcaagagtagaactgaaggggactcggagaaacattaggggaattagcaaggcagactaaccaatgaagggacaggaggctttggggaaaatagccaatgctttagtactgaagtttaagtgtggctgcagttgacttctctacagctattcctttgcgatctcctctctcaagcctactttctagaaaacgtttgccttctctttgtacttattaactttgagtggttagaagaactgaaataaaccagacagtggctagttctgttttcagagaaggaggtatcccatggaagattggagagtcctgtgtcatgttccttcatgatgctgtgtgcttactcctagttccagtaacttccgagaaaaaattgctctaagttagttgaaagcaaaagatttttgtttatgctttgactatgactagagtagcattttttttcctgtaatttgaatcttagtcctaaatattgcttgcatttagatacaatagtttattccagagtggcttgagactggtggatgaccaccgcagtgtcatttttggaaacatttccttgaggataaactaaagactttattttccaagttgggagacttcaaagaggaaatgaaacaaatgaaaacgatgttattgagttttgagaagttgtctctttctttggtcccagtagatcttgagatgtcctggggttgtatgtcactgagtaatatgcccctctgttattgtgttcaatttaggctgattcagaagtcattgagaagtgggtgagtggcatcaaagacttcctcatgaaagaacaggctgctcaaggagacgctgctgcgctgcagagccagcttgaccaatgtgctgtgagtgcctccgctctggcaatcctactggaataaataacattctcttctcgctctttgtcacttgccattattaaaattgtaagaatagggcttatgaagtctagataaagagtcttttattgtaaagcttttatttttacttcgtagctaataaaggacagacagattgctcatattatactgccgtctgtggttataggattcgtgatgagaacaagagcaaatttatttctttggaagctgttttcttctgttaagattgtgatcttaatgtaatgattatcacaagcatgctgctgccattgtagcacatgacgaacctttctgagcagcatatctagcaaatgaaatgtgctagcaacacaatttatacttgagactcaccaggtctctctagagcagtggttctcagccttccgaatgctgtggcctttaatacagtccctcagagtgtggcaaacaccaaccataaagttattttcattgctacttcatgactgtaattctgctactgttatgaatcataatgtaaatatctggtatgcaggctgtctgatatgtgaccctccccccacccccaaaggcctacaggttgagaaccgctactctaagttaattaaaagtcatacttcccactgagattcaagtaattctaatttaatttttagcgggcgactgtattaaatgctaggcaaaatgagtttcttgaagtgagtcatctcttaagtagctgagaatcctgaataccagtcactatgtccttgaaatatttgcaggatccaggtagataggtgtgatactgatgtccacttacatgggagtacacttaacatggacttatctcctgtattcagacgtttgctaatgaaatcgaaaccatcgagtcatctctgaagaacatgagggaagtagagactagccttcagaggtgtccagtcactggagtcaagacatgggtacaggcaagactagtggattaccaatcccaactggagaaattcagcaaagaggtgagcttggcaccttctttaggaaggggacacactgtcactggcttctcttgaccacaaaatcaaaaccaaaaaatagtgctctacaatttttacaggacagcataaaacacacttaaagcacacatgcacagacacatgcatatatatatatatatatatatatatatatatatatgtatatatatatatatatatatatatatatatatatatgtgtctgtgtgtatatatatacatgtatatacatatacatacatatatctgtgtgtgatgtacacacatacaaacaatattctttcatagttttaagatagatattaaatatatattaaagacatatataaagatacatatatcttatatataatatatttacttattttatttatttatatactacatatacatataatatataaagatatataaagatatattaggtatataaaatatgtatattaatattaagtatataagatatattaaatatcttaaattaaaatatattgtatgaattatatatatttattatattagtatattgtataaattatatatgtgtgtatatatacaaagacatatatatatatgtatatatatgtgtgtgtgtatatatatataaaaattaaggaagactactgcttgcttagtgagactcaggactgtcctattctttctgttttcaactgagttccacacattcatttatgacacttgccttgccttgaggacatttcagtgtggtatctactgattatagctattaatcctttaagcagcacatatttattaattaggcataattaataaatatagtgtagtattttcttaattagtgtctgttgctaggcttctttgtatgctctgggacacagaaatgaccagaggaaaagtttttgcattcctatgaggcaggtgagctgtcagggaggggcagccaagaattaagagaaggtagagttcttggcaatcgtttagtcagggagttgctcacattgggacattgcagaggtctgagagttggtgactcttggctggagagaccatgtttgtggtcaggatagcacgtgtgagctgtatcccttgggaacagagacaggccttgggtggaggacaatgtcagatggaaaactgatgctctgggtggctccagagattggcaaacggtgtgtgcgttcgtgcgtgtgttctgtgtggattgtggtgctctctgagtgataagaacccaggagcagaagcttcctagcagcaggtaactggatgagacctgttctggaaggatggaggtggaggtaactctgtgcatgcaaaggctgcttcttatttttcctctttttaaaattttagcttttaaaattcttagtgcccttggggcatgggaagcagaagatagtaagagaggtgaataaagctagaggcatgagtcaggttatctgagttaaaaatcaagctttaactttaactcaggagcgacttcggatgaccccaagaaaagtgcatcccctggcgaggtggggaaggaagtgacaatggacagtgggggagggaatgggaaggaaccctatggtggcatgattgaatgttttgttcttgttttagcccaacatcttcattttgaacatattttatgaggagaaaaatcatactaatcctacagagaaacacccatggacctattccaagatttatcagtagctagttttgtattatattttctatgtatctctgaaaatatgcttcatacaggaacttgaaattattgtcatatattataatataggcatttgtcaagatgccatgatccaactcaagaaaataatctttttttgtaatatcactgaatacactatccaagtttgtatttctgtatctgctttataatctgacagtgtaagcagctggggattttatctaaggaaataaaggacaagcttcctaagtgacattgaggaataagcaaccatgtagcatccattcgtctacttatcccctgtctcctgtatccatgcatttatccatctgtccttcatcctccatcatcttcatccatccattgtctaccattaccatctcctatctgtcacatccatccatccatccatccatccatccatccatccatccatccatctactcaagttcatctgttcacccacttgctcataacaatataaaatctacggtacagaaagtatttagatcagttctagacggtttatctcactcactagtaaaatttaaaaagttgtatagtgtgtgtgtatgtatacacacacacacacacacatatatatatacacacaaatgtacttaggaaacataggtctatctggggctggagagatgggttagcagtttagagcccttcagctcttgctgaagacccaggttccatttccagcacccacattggcaacatacaacagtctggaactccatttccaggtgaccttgatttgcccgcttctggcctttgtggttaggtgaggagctctgaaaatattcccagactcctctgaagtacttcacaaagttacacagtctgtacacagactgtgtacaggcaaaatatccctacacacaaaataaaaataagtaaacacaggccatgtcaaactaaaatgtacagaaatgtgtctcatgtatgctaccatgacagaatttaacactgtcctaaaataccaagtctatagttatgatcttgtggattttattttcaacttttctatggatccactaaaatgataatatttattgttgttcaggaaatgtaaaccaagagtctacatttatgtgactacattgcattttacccccccccacacacacacacactatgccatagttttatcaagagctgcttaaagtgttgagcaagggagaggagcactgtgtgctattgtggcttctcctagaagagtcacaccctagcttgcggggtgggcatggaaagaaaagttccttgtctatttttaggcctgtgctcctgtttggagggagggaacaggaaagccactaaccattccttaacccacattcctgtgagcccatcctgttcctggcctggcctccggtttctgtcagctctggcctccactcagacatgtaatttgagcaggctactggacgtgtcaggggaaggttggacgattcctgtgtgacacgatcatctctttcagccgaagtgcatttgtggttaggtgaggagctctgaaaatattcccagactcctctgaagtacttcataaagttactgagccagattcagacagatagctattttcaaatatatgttctacttcctcctcctcctcctcctcctcctcctcctcctcctccttcttcttcttctctccttctctccttctcctccccctcctttttcttttacaaaacactttacttatgtgccttggtgttttgtctgtctgtatgtctgtgtatgtagagtgttggattttcttgaacttgaactggagttacagttacagaggagttgtgagccatcatgtggggactgggaattgaacctgcatcctcgggaagagcagcaagtgctcttaaccactgagccatctctccaacgtctatcttctactttctgtttttttttttttaagatttatgtatgtgagtacactgtaactgtacagatggttgtgagccaccatgtggttgttgggatttgaactcaggtccttcggaagagcagtcagtgctcttaaccactgagccatctctccagtcctaccttctactttctaaccaacattttatagggtaatgccttgtggacatcttttgtaatagttcttttcatcctcagttttttccccttatttttaagaacatttttttgagaacaggtcttcttctgtagagcaggctagccctggatttacagagacacacctgcttctgccttccaagggctgatattacaagaatgtgtgactgtgcccaactccaggctcagtttagaatgtgaggccacaccatgggaattctgcttcctgttttattttttatataatagacagtgttacaattaaattacttgatgttcatacctttatcgctataggtgaagctccttaatgtggaattaaaaggtcagaaacctagttagtttctgctgcttacctttcacagtgttgggagtacagtgcaggctgccagggagaaaaaacaccagctgtgaaccctattttcagagttatattagatatcttctagttaggttcatgtctaaaatgttgtatagaagtcattatattttcatcctttcttacattacacagcaccagcacaggatgctttaaaagttttatttaaatgttaaaaaataagactggaaatctattgcagtgcctttaaatattaaagggtagaacttggcatttaacgtattaaaatttatttattgagtggaattggcgtttccttcctagattgctattcaaaaaagcaggctgtcagatagtcaagaaaaagccctgaacttgaaaaaggatttggctgagatgcaggagtggatggcacaggctgaagaggactacctggagagggacttcgagtacaaatctccagaagaactcgagagtgcggtggaggaaatgaaggtaaggccttcctcccgactgccctcttcacactagttagtctgttggtctttcacctatcacactgcacagaaccctatggacaagtctgctctcagtaggagtgagtgatgagcagctgtggtaatcttagttgggaaagaggctgatgccagtccactggttcaagtccaccccagagtagatcgattctgggaagtccctgtggatagtcatggaggtttctgtctcgaagaagggttgtgaggagaaactcatttttcttttattattgcaataaacacatataatataaattttttttttacccttttagcagtttcttggtgtatattttatggtgttaattctagtcatggtaccgtgtgacttctatcactgtttccaggaagtgtaagttttggtaaggagcaaaggagacttggaggttattctagttctaatgggtttcattctagtcattcgtgggggcccagggaaccccagaatgtctttggagcaggaggcaaaggctacattcaagtcagtattgggagtacatgggaaccccagaacatcccaggagcaggaggtaggagatatagagtcagtaatgagggcacataggaaccccacaatgtccttgagcagaaatcttggcgtatacagagaagataaggtgaagataagttggagttacaagctgtggttccagaaacatctattcctgtgtcagtagttgtccttgtataaggaaagaactgggcctcagacccacatttgcctccactatccttctagcatgagggcgtgattctgtctttaagagtcatccttcttgtcaggtggtggtggtggtggggatacagctttaaccccagtacttcagaggcaggggcagaggggcagaggggcagaggggcagaggggcagaggggcagaggggcagaggggcagaggggcagaggtaggtggatctctgtgtttgaggctagtcagtctacagagcaagtttcagagcagccagggctacacggagaaatcctgtccttaaaaaaaaaattaaaaaaaaaaagtacacttctctttgtaaaagatcaagtaacatggtatattgttaactagtagttatactaccaattaagttggttaactcaactagtagtataactaaggcaaacttttctgtgcaggtagtttttaaaaagattctatgtgacattcatgcatgctatcttgagtcagtagatatgaaaagagacttatttaatctgtgtcggggatcaatatatatataattttcttttttctaaaattttttttattaggtattttcctcatttacatttccaatgctatcccaaaagtcccccataccctcctccctcactcccctacccacccactcccacctcccggccctggcggtcccctgcactgaggtacataaagtttgcacgaccaatgggcctctctttccactgatggccggctaggccatcttctgctatatatgcagctagagacactagcttcgggggtactggtcatgtagctctttttgaaaagttttaaaactatttttagtactgaaaatatttaaaagtagattactatgtaaagaatggctaactcatttatcactcacacttttggagctgcagtttgctgctgattttaaaagtcattgtagttgacagtgaagaaaaatgagattacaatccctgattgggcaacactctatttatttttattctttaaaacagccattaggaatttaaaagccactacacttaattactttttccctcaccctgggagagctgaaatccattaagcaataaagcaagctaaaggggggagtgaaagacggctgcaggtaggttttcctgcatgtgagactgagcaccttgggcaccgagagaaagccaggaagcagctatttctggatcaggttgtccagaggagcttcttcatcttcattattggaaggatggatggacccatggtcaaggaggaaaatgtttttacaaggatttgtgggccattttaatagatgcctctgccacagtgtcctgccattttggggggtgtttatttatttcaatttaatgtgttcagacctccagtggtcatttaaaatgagttcatttagattcctaccctgagtccagaatttaaaaatatatcttgccagtagacactatttaggataacttgcctctaaactctggtggtattaaaaagaaactgttgtgggctcggggaattggaaactagaagagtaagtgagattttatttttagcattcttctttcaaaaaactcaggttacagaattttttaaatagtgttctactgaggcatatagaatcatttagttgttttgatattggattaatcattattattattttttaaagaaagatattagtcacagagagccatgtttcaaattgctcctttcttgggacagagggcaaaagaggaggtgctgcagaaggaggtgagggtgaaaattctgaaggacagcatcaagctggtggctgccaaggtgccctctggtggccaggagttgacgtcggaattcaacgaggtgctggagagctaccagcttctgtgcaatagaattcgagggaagtgccacacactggaggtaagagcttgtttgccccagggctaccatcctgagatcccagctctgctgtgtggatttccctgtcttatttaaaaaaaagaagaagaagaagaaagaaagcgccattactttgtcaaacattggattataaaagtaatttttatggaccaagtagataaaaaaatagagagatttttgtttgttttgtgttaaaaggagaccaagatctgcctgcatttctcaggaggttcaatggtgataattgatccccgcaggtttgtgtgctcactagtgttctcaggttaccataagaatccagacagctctcttttacctggctgactgttattttatttttattttgagtcgtgtctaatatttactggaggggaaaaagaatttcagtatgtagagatttcattgcatttttaggtggagaatctcactgcctatcagactgaagacctagattattctgtgggattattttaataaagtgctttctcatcttcatggttaaaaaaaaactggtcaaaagtcttaagaagcgttttgagttattcaaatttaaatgaaacacaccctacaataagcaattacattctggtgagttctgataatgccgagggaagatttaaactgagtttactcattgtacttcttgtaagatctgagcagatttttcggcctgcttcttgtaagattaatgggagaaggggactagaaatctctttcttcttttgctctgaaccaagagtcaacaaattatggtagaggcctcaggtataaattgtgtagtttgagctaggcaatggtgttctatgcctttaatcccagcaccctgaagggagaagcatctctgagcccaaggccagcctggcctacacctgaggtctggaacagccagggccacatagagaaaccctgccctgaaaaaaaaagttggttttttttggggggggggtaggtttggttaagagtggtatttctaaaggattgaacatggtgtaaacacctatacaccaaagatgaagctgtgacaaactatggatgtcacccctaaagtctgaaataccttctctgtgcctctcgagaaataccggctgagccctgttctggcgagcagagctgatgtggggaatggatgggactgtgccctaccttggtagagaagacagatgcaggggattttgtgcagagctctaatcttagcagtcagataagatcctctcttgttctggagcaaggggatagaaggctctaaatgcatgccttcctcggcttctctcctacttcggaactctgagtagggagaacacaggactacctggctcctgttttggtaaaatgggcccatcctcttatgtgtctatctttactcacttggaaagaagtccagatggctacagagacatctgctcccatcagtcatctaggaactggaattggatatgtcctaggagatttaagtttctataaaaaaatatcctgaatggtttttaccttttgctctttctgggggtgttgctgttgttgttgttgttggtggtgttgttgttgttgttgttgttgttgttgttggtgttggtgttggtgttgttggtgttgttgttgttgttgttggtgttggtagtggtggtggtggtggtgttgttggtgttggtgttgttgttgttgttggtggtggtggtgttggtgttgttgttgttgttgttgttgttggtggtggtggtgttggtagtggtggtggtgttggtggtggtggtggtggtgttggtggtgttggtagtggtggtggtggtggtggtggtgttgttgttggtgttggtgttggtgttggtgttggtgttggtgttggtgttggtggtgttggtggtggtggtggtggtggtactggggattggacttagggcctttgtcaggcaagtacaggttgtagccactgagctaaatctccggctctaacattttctttaaaacaaacaaacaaacaaacaaacaaacagaaaatgtatttctctgctgtttttttcccctattaattattcaggtttgtttttttttttaacatttagccaggtccttggaactcattttactgaaaaccgaggcagcttcttttccatttttccttctccttccatcttaattgctcctattttattgaagatttagttttgcctcatttatttgatattctagcttcgctggtttctggattcctgtatattactcactgaaatggagttcttattgatcgaagggatgacgtatggttatggcttctcttccgtgttaattttcccttcacatttgttaggaggtctggtcttgctgggtggagctgcttcactatctggacctggagaccacgtggttgaacaccttggaggagcgcgtgaggagcacggaggccctgcctgagagggcagaagctgttcatgaagctctggaggttggcacctgatgtctgagccacagttattttcactgtgaatgggaaagatgtctgtctgtctgtctgtctgtctgtctgtctgtctatccatccatccgtgcatacaataggatgtgtgttgaggtcagagcacaatttgtaaaagttattttcccccttgcaacatagatcccagggatcaaatccaggtcgttagggtttgtggcaagctccttttgacccactgagccatctcaccggcccctgggaactctttataatcagttttgtaaggcaggagctacatgagtgcatgttagacacagcgatagtcactagtagggtccagttcttttcaccattctctgaacaaaccctgttttgtttctttgcacttatgactatggcatgaaccatgcttcaggtggcttcttcatcattctcagatgtaaaaagttaaagcaggctgctatgtgcattcgtgaaggcaggggctcccacagtggggctggatgacaaggctgggcttcaggctcctggggccaagaaatatcccgaaggcttcctcgttctgtagtttcgagcccaggagtacacacgatactgtggtaattacttcagaaacgaattacagtgtaaccaaagaggtttcacttgtacaggagtagtagggaaatttggggatccgatgaacagcagaatgggaagtcagagagctattcccagggggtgggggtgaatggggctccattcctgaagatggatgccgtgcagggagagaattgtcacttctcaaacacagcagagtagaggatgcatagacagcatggaaaccactacatgcccattgaacaaacagcaagcatgcttttctcatagggcataaatatacattctagaaatccagacaatggagaaaaggaaaagaaggctccatgataaacactttaatacattctgtgttctcttctcttctctcttctctctccctcactccctttctttctttcaggtttatttatatatatatgagtacactgttgctttcttcagacacaccagaagaaagcatcagatcccactacaggtggttgtgagccgccatgtggttgctgggatttgaactcaggacctttggaagagcagtcagtgctcttacccgctgagccatctctccagccccctgtattttttctttattatcagcattccttttgtgcatgtatactgcagggcagtaaatgcagtcaaagggctcctagtcctaagagcttcggaaagagtttggagccttaggatttttgtttgtttgtttgtgttttgtttttgtttttttttaattgactctcttttgtcaaattgaactttatggctttcagatttcccatctgtagaatgggagtagtatttcatgcataaggttagttggacttgtgtctataaaactgtatacatagaaatacttagtgtatttctgtatcataaggtagaaaaatggatctctaattttaccaatgtagttaataacatgagataattttatttgtagagtacagttttgtatgtcacactgagagtttctcataaaattaataattattcaaattattttatgcatatgttcttgaagtttttttttaaagttttgtgattttgttaatctatagtggataattttgtgaattagttatttccttaatatttgtcattacttgtttcttaaatagatttctagaaagtggaattaatattaatgcttaaaatggcattttgcagatcttgatccatttagacccattgaatgtattttttcccctgcccaactgcagtctcttgagtctgttttgcgccatccggcggataatcgcacccagattcgggaacttgggcagactctgattgatggtggaatcctggatgacataatcagcgagaagctggaggcttttaacagccgctacgaagagctgagtcacttggtgagaaccagacatgtgcagtgtgattaggtagttactgccacaagctaactctgagagctctctctcttactcggagcttccgtgctggttacacttggtaatgtataaattggtccccattagataatgctttggtgtggtgggagttaaagtaggcaggcaatgttaatgggagcataagggctttgaagtaagtatagaagaatagatctaatatttgtaggtcagatgcagcttgatcaaacaaacaaacaaaagacaaacaaacatccaaattgccaggacaaggcatggtggtatatgcctttaatccaaaaacttaagaggcagaggcaagaatatctctgagcttgaggctagaatactctgcatagggagtcttaagccaggtgaagctacatagtaaggtattgtttcaacaacccaatcccaagccaagccaaaccaagccaagccaaaaatgaaaccaaaccaaactttgtcagatactggatgtagcccagtggtaaagcacttttgttgtacacacaaggctatgtgttaagttcccagttaccttctatctccaacacctctttgagatttatttctatttgtgaattatgcagttttctgtaagaatagtattacagctatgtctaagaataataacgtctatatgtatgtcctaataacgattagggccttccgaatttgacattaactgttatgaaagctacatcactcggctgatgctcagattatatctcaacatgcatatccatatcagtgataagagaagggaccttgttcttttgtaagaaggttgagttgatcattagataactataccagattaccaagtaacaactgctgagattagactaaaaatatcattgagcttaatccaaagatgtgtggcaattagtggtttgactcacatgtgcactgttagaacttgttctcaattttagaaaaaaaaattaggtatttattcacttgatagacattcttactatgtcttattttttttgttaggcattggagattcttaaaattgctttatatttctagtaaaataaaaaaattagaaattacaaattttactaagtttaagacattttgtatatgtgagtgtctgcatagatgtttatgtcccatatatgcgtctcatggtcatgttgtccagaagcgggtatctgaccccctatagctggagcacagatagtcgtgagccaccctcactatctactagggcaacaagtacccttagccactgagccagtcgcctgaaatacacattttttttctattttatatgtcctatgggggaatctttttgtacttgtattttgtcatagtataggttaatagaagtaagaatgagagattcaggggctggagagatggctcagcagataaaagcactggatgctctccttgattcaattcccagcacccacatggtggctctcaactgtctttagctcctgtcccaggggatccgacaccctcacatagacatacaggtagtcaaattaccaatgtatttaaaatgaaaataaataaataattcttttaaaaatgagaggttcagctgctgtgtccatgagatactagaagaacatttgcactcttattatgatcgttattaattatttataagaagagctacagtcttgaaccagtactttattataatctgcatggccagaaggcacattcagctatttatatttgtgctgagcagttacaaaggaaatgtctcctctgtgcaggcggagagcaaacagatttctttggagaagcaactccaggtcctccgcgaaactgaccacatgcttcaggtgctgaaggagagcctgggggagctggacaaacagcttaccacatacctgacggacaggatcgatgccttccaactgccacaggaagctcaggtattgctgcaaagccgagagcctttgcgtcttgagaaagggcagctgtagcctggtcctcactgccagagtcaggaggactctgtatggaacagcctttgggtgggggctgttcttgttccttgtgtgagaacttgacacattttctccctaccattttatgcatatgggtgtctggcttacatgtgcatctgtgcactgtgctcgtgcctactgcctgtggatgccagaagacagcagtgaggcccctggaactggagttagactgttgtaaaccaccctgtggggactgggaaaggaacctagatcctttggaagagcagctggtgctcttaacagctgagccatctctccagctcctttcacacagttgatatgttagaaaatagatttcttcctttctctctttctctctttctctctttctctctttctctctttctctctttttctctttctctttctctctttctctctttctctctttctctctttctctctctctctctctctctctctctctctctctctttccttccttccttccttccttccttccttccttccttcctttgtagctatacagttcaggcagtttattctgtatacatcagatgtgaacattaataatgacaagcaaagaccttagcatgtgcatagcacacggtggtgtactgtgcaacagtttgttattatcatgtatcccacaagcttattagtgtgtattagatataggatcatatactatacaactaccttgaacttctgtattatatttcttcctgtacttggttgttgtataaagacatactgctgtattccaactgttgttatataaaagctcacatgttgtgtaaaggcatactgtaactcgtgcttgtctgggacttactatgcagccaagggtggccttaaactcagccatcctccagctgcagactccagaatgctaaggattacaagcatgggccattacccagggcttctttgtgtactttaaaaacacaccttctcccgttttttatcttcttggtagaagatccaagccgaaatctcagcccatgagctcaccctggaggagctgaggaagaatgtgcgctcccagcccccgacgtcccctgagggcagggccaccagaggaggaagtcagatggacatgctacaggtaaggactggcttccctttgctttttatatatggtgggtatagaaaagaaaagcagaaaggcttaaggacttcggtaccttcgctctgtgctatgattcaaacatgggatgggagcggagtattaaaggctcatggcaacaggaacaggttgttagctgggtaaggaaactatgagctttaagagttggctgagaagaggggatgagttcaggccagcagttgactttgtgtagaccattctctgatctcagaggctgatgtctgggcactcagggcctcagtaggtagagggaaatgagcttccactcttaatgtggtagaaggcatctgaggtctatgttcatgaaaaagtgagtaaatgaatggactttctcatccagagacaccatctgtctccagatgtagtttggagactgaaattctgagtactgctcactcatgacatcgagcagtggttctgaacctgtgggatgtgacccttttgggggtcgcatatcagatctcctctgtatcagataatatattatgattcatagcagtcactgaattagttatgaagtagcagtgaaatagttttatggttgggggcggggtcaccacaacgtgggaactgtgttaaagggaacattagaaaggctaagaactactgctttatatgaccgtcctaattcctctggggtttcctgggttggcctgtttttttttttttttgaaaagtctttcggcattatgtattatagtaatatctagttagagcgaaagtgagtggcttactcttatttctgcaaacagaggaaacttcgagaggtctccaccaaattccagcttttccagaagcccgcaaatttcgagcagcggatgctggactgcaagcgtgtgttggagggagtgaaggccgagcttcatgtcctcgatgtgagggatgtggaccctgacgtcattcaggcccacttggacaagtgcatggtgagcctgaggcccagcaggcagctcacatggccagagctgctctgatggtttagtatagagcatcccttcttattctttagttcagggtatggagatgatggagactgtgtcagaacaaaaagaactgtggctctcccagaaaaaaaaatagacagtataagagtaataggggagtatgaaagcaacaggtatgatctgtgcagataaaggaagcagattgcacataaataacatggatttaaaaagaaagaaatgtataaactacaacatgaagtgggaaagacctctctgaaggatgcaactgataaatgaaactttccacaataaatttgaagtacctctaatatttggaatattatagagtaaaaaaaatattttgctaggaaaatgacattcaagtcaaagtttaaacttcagatgggcagaaatgaatgacaaataagaccttactattccattgtttgtagttagtttaatagaggtttataaattttatttgttttttattttttaaacaagtgctctatctgcatgtatgcctgcatgccagaagatcccattacagatggttatgagccaccatgtggttgctgggaattgaactcagagcctctggaagagcagacagtgctcttaaccactgagccatctcgccagccctaatagagagttttaaatgatgttgtggggaggacctgaacttagccttattgtgcccggtgctcttctatctcctgggaggagatattggtaggactgtcttttccatggtttgtttcttatgtgggtggaatagtgcacaggtaggagacgtttgaatcacatgaaagtgttgtaagcatctgtttgctcattgggacagagtagcagatgtcactgtatttgacatcacagatactggctttgtatccttgaagtgttttgagttggatgctcatgtatggataagctgcctagacagagtttgggggttcacggtgacaagtacgaaggcaatttggaatttgacctgttgaactccaacttcatactcatatccattttgacactttaaagtattaagtgtatttcagaatataaattatactcattatggtacatttgtcttctctgaggaatagaaacaaataaatgttagggattccacattctttcgggcacagattgccagaggcaactgtcttccagtcaccggtgttaggattaaagaattcattcagtgccgtgagttgaaccaaggaccttgtgcatagtaaacccatgctttctcagtaaggagtctgccatccctacagtgtggttccacacagagacattccagtttgcatcctgtaactttccaaagtttttgaaggaaacatggttacagtgagcccttatccaggatttctactgacatttaatacgcacgtcttgttttatatttaaacacacgcaaactctattagtttattatctgatttgaagaagcattacaatcctgacttcacttaattcaaccttcaaaccatattcaagacagacagtgtgccctttcatatccgggatgaggtattatctgtccagccacagaagctgtgctctgaaatgatgccagtcgggaattttctgttaacaatggaaattttttttcctcttttttaaagaaactatataaaacgttgagtgaagtcaaacttgaagttgagactgtcatcaaaacagggaggcacattgtccagaagcagcagacggacaacccgaaaagcatggacgaacagcttacatctctgaaagtcctctacaatgacctgggcgcacaggtggggggcgcttctctctctctcctctctctatttatctgtcaccccctctcccaacatttatcaaatttaatctttacttgtacatcagtagtataatcgttattagttatataaatatttttagattacttaatacaggatgatatttatattttccatggccattggcataagttattctaaggaaactcaacaaggtaatagtttctgtataaactttggttttggatatctaaattcagtaggtatgttatcatgtcaggatctagtaaatacttggtggtaggtagtctaccgagactaaaagcgtccattgtatacttcaatgagtgagtgttaagagttggtaggcaggccattttctgttgctaaatcccatagaaaaactgtcctctgactttgagggtttgccctgaaatttagagtccaaagaatacgtgaaattagctagggagaggatatgatgagggaaaatgaggctactgagcaagtgttacggattagcaaaacaaactttaaaataagaagataacaggtgtgataggtgtatggcagggatgagctctgggaaaccaggagggtagtatttcaaagatgagttcagtcatggctctgtgaatattgtgttcacttaaaaatgccctttgcatctgttgccttggggttgttattgaatttagcaagggatgtgtgagaagtcaggcatagcaccacactctaagaagcagctttgatcatatggtaaaagtagacagtggatatttagggaagttggtgtgtgtgtgtatgtgtgtgacatgagagtgtttaaaatgtttacccagaaggaatggtcctataactaagagggaagggagaatatccaggtaagttggggtgtgtgtgtgagtgagtgagagagagagagagagagagagagagagagaagagaggagatgagagtgtttaaaatgtttaccaagaaggaatggttctatagctaaaagggaagggatgagcagtcaggtaaagccttacatcttcctatggtcccttgcagatgcccttagcccacattgatgaggttgagaaaaagtgtgcatccttataagttgagcttggatgcttttcttcctgatacagaaatctttgtgagcactaagtttggtggtacttgtggagctgctcgggcatgtcagtcagagaagcattctgtaattcaagtgtttactatttatttttttaaagatttatttatttactttatgcatatgagtacaccattgctctcttcaggcacaccagaagagggcatcagatcctattacagatggttttgagccaccatgtggttgctgggaattgaacacaggacctctggaagagcagtcggtgctcttaaccactaagccatctctccagccccaagtgtatactatttaaagtctgtgttctggtgctattttttttttgtttgtttgttttgttttgttggttttttttgtttttgtttttgtttttcgagacagggtttctctgtatagtggtggctgtcctggaacttactctgtagaccaggctgggttctggtgctattaattgagtgttatggattcagttgaaccacactgtgtctttctcattgtgtccttgacctccttgtttactctgtctcacagtgtccttggtccccttgtttatctttgactcgctcaccatgtctttgaccccctttttaggtgacagaagggaagcaagacctggaaagagcctcacagctgtccaggaagatgaagaaggaggctgccgtcctctctgaatggctctctgccacagaggcagaactagtgcagaaatccacatcagaaggcgtgattggtgacctggacacagaaatctcctgggctaaagtgagttttagttgggttggacatgtcccatcagtggcatttgctttggacaatctggctggacactgcctctatttcgtattaattgtaacctctgctcttctccctccctttctttccctcttctgtgatctgggaagaacattttgaatacaccttgtttcagaggtttctctctgtaacctgggctgccatgcattcattgaatatcacacgctggccgtaaatctgcagagtttctcttcattagcttctccagtgctagggtcaccatcatgtgcaactatgctcagttaaaaccaggcattttaacagtacttttgtgtgtgtatgtgtgtgtgtccgtgtatgcacaagtgtgtcagtgtgagtataaatgtgtgcatgtgtgtttgtgagtgagtgtgtatgaatgagtgtgagtgttcacatgtgtatttgtgagtgtgtgggagattcggtgtgagtgtatgtgaatttgtgtgtgtgtgtgtgtgtgtgtgtgtgtgtgtgtgtgtaggcctgtggttgatgtcatatgtccttctcagttgctttctctgggtcaaactctcattctgaacatgaaacttactgttttggctagacttgccagcaaactcctgtctctgttttccccagtgctagaattctgctctcgtttctgactttttacagcagtgtgcaggatcagaactcagctcttcattattcagcaagcactttaccaactgagctgcctccacagccccgataaaacacttcatttcccttccaaaagcgctgaagtcctaggagtcatcaggccctttttttacattatgcttaggtagtatctgaagatgttatattaacagttagcctccttagctgggtgtggtggtgcacacctttaattccagaacttcgaaggcagaggcaagtagacctcagagtgttcaagagttccaggatagccagggcaatgtagagagaccctgtctcaaaaaagaaaggaaaagaaacaacagaaaaaaattaatcacctgtccatgacattttctcccagtattcattctatattcatattatttatatttatatctctctttctctctctcttttatctatctctagctacatagctatcactacctttatccctatatctatctatctatctatctatctatctatctatctatctatctacttattgcaaaataactgatgcagaaatcataatcacataatgtaaagcaaaactcacacagtttcctttagccttctagctatttggaataattcctacttaggaattaacatgtagcgtcttgtttctgagctggacacgggattggatggaggccttctcttttcctgagttccttttgtatgaaagacacaggcatgcttgagaaccttcgcaggatacactggctgcagaaacatggacgacccaaagtctctccagtgaactctgtagggtttcctgcgacctctgtgagaagggactcgggcttaatgacgtaactcccactcgcctgaacgctcagtggcagggacacttgggagaaagtcaagctgttgctctgggaagaatattccagtttctaagacagtacatggaaaggagctcatgctctgtgtgtgggggacaaggagcagagagagggatgtggaaggaaaaggaacttgaaggtcactggtgtattctgactggctgaaaaagaaaagaagccaaattgattttgttaactgtgatctttgtttagtatgctgaaagcaattcttctcttcccttggacagctccaggctcctccccctgctctcgcccctccctgtgccaccattcctcttcttttgagactgggtttcaccatgcagttctgagtggtcttgaactcttgatgcctcggcatcctgatggtgaggatttcaggccagtgccatcagggcctggacacactgtcttctttccttattatctctacgactttcactgtttcccagagatcacaaactctccttggctttctgagttgctaaagtcacagtttatgtgtaggacctaaaataaagtcaaacacaagctaactgtgagcttggcagtttgtctttccctctgcttttctagtgtatgttagacaagcctactcctatggttggttgtttttattgcccaattcttccactcacagctgtttaccaccctccattttcattattatgcatagttctatgaacaacattcctatggctgattttcagcatacatttataattgtttcctgaatgtgttttagtagctggaaaatctaaggccaaagaatacacccattttaaatctcatgtgtgcttcaagtctgtgccatagacagtgcattacaagcaccacatatgcatcaattcctccctggattttgaaaatacattcgaccgtggtgtacaaacacggtctctgactatccagttagaaccttttccatggcttatagaccatcggtagcccctatttgaaaaatatttttcctgtagttttgaccatttttaaataaccagattaaactgctaattttgatttcttcatcagacttattaatgctcgctgtgttgtgtagtatttaagaaattcctttctttgtcattgcggttcacttcctgtccttattattttttttaacacacacttaagtgtgattttaaagaacagaatactcagttccttgttattggtgccttccgtttcagaagggctgccgtgaccctgagcttctgtggaatttcttcatgatcttgtgtagtctcatcccttcaactttaatgtttaatccttagaggctaatttgctctatattaggagagaggctctgaacttctccccgaagaacaaacgtatgctcccaggtttgtcggtctgagttctgagttcttctctagtctaacacagtagttaatatatcattgttgttttctgttgtacaattctggtcttctaccctcccccagttcccaaactgctgagtgagtcattccgttagctattttaattctcagtagagggtccttctctttatgattctcttcgtggcttatgtacttttatagaaatagtccccatatttgtaaaataacttttgtgtggatttactttaaagctctagacttgttagatgagaacttatgtattttgccttttgtttctgtgggggctggagattaatcccaggtcctggcccatgccatgcgagtgccctgccagccttgctaaatcatttataaataaataaaacaaatattggttgttattgttgtgtatatacatgtctgtgtgcgtgcacatgtatgtgagagaatgtatgagtgaggctcacttgtgccagggcatagatgtgaaggtcacagaataacttttagaacttggtcttctctttccatatttatgtgctttccagggatggaacttggattttcagacttgaacagcaaatgcctttgtctgctgagccattatgctggcctctaggtgtagcccaggctggcctctaggtgcagcccaggctggcctctaggtgcagcccaggctggcctcaccctggtgattctcttgcttcagcctctttagcacatcctactagcacgtaccaccacgacaggcttcagtccttattaaaatgctatgtctcactttcctgacctttcagttcttttactttccctcataatatcttaattttttcctgtataaacattgtgtgtatatgcgtgggtatatatatatgtgtgtgtgtgtatatgaataatgcatctattttatattattttgttttattaccatataaatgtgcattttcctttttttactgattgcttttatatgtgtgcatatataatatataggtgagattgagttgtatatactaatatttgatgatcctttttttctggtctcataagttccatttttttgttaactatcatttttgaagacagactataaatagtggtaagcttgtgaaatatataattttgaattcccaactaattgttttacagatctgacatagttagggtggcatctaggaagcacccagcactttcctctcagtggggtgggaggaacgttgatgtggagcatagccacccacttttctttttctatcagtttatttatttatttatttatttatttacatcctgattgcagcacccccccccccccccactcaaccccttctcttattctcctacccttttcctctgagaaggaggaggcccctctgggtactaacctactgtggcacatcaagtcactgcaggactaggcacatcctctcccactgaggccagacaaggcagctcagttaggggaacaggatccataggaggcaacagagtcagggacagccccgcctcccgttgttatgagacccacgtgaagatcaagctgtacatctgctacatacatgcaggtacccaggtctaggccatgtatgctctttggtgattgcccaccttttcaatgatatgtcttaagatttaaaaccattaaagatttagaagatattttagtttcataaattaaatattatgtgcaatatttaaatgcagaatttaagtggtgtttttatttgtggatgtaagtgggaaatttattccatacattcaatattattttaaacactttttaccataaaacccaccagacttgtgtatgtattatttaaacttaattacttgtctgtagttattttttatggttcttccagccaattttagtcagttactacagaaccactgaaggagcgcagaaagtctgaactacacagagtacatttgtaatagactttttctctcatttaggggaagagtaggagcaggaaatacccgactgcctttcaaatgcgtctctaagtgtcatgaccaaggcagtgtttcagccttgactcccttgtgggtttgtgatttgtatccattcagaaatgtgattttcagcagtgttcacataagaacttgaattccttgaagtgatttctttaaatgttgatttaagaacccgtaccacagggaggtggctcagtggccaagagcacttgctgctcttgcagaagaccagtgtttcattttgaggacccaatatcagcgtgtaactttaggtctggaacatctggtggtcctcaagggcacacgcacacctctgtcctcaagggcatacacatacacacatgaacacttaaataaactcacacacgtacacttaaataaacagaaatatgaaaagtactttttgaaaaaggaacaacagttgaggagtaagggggccacgggtgtttccatatgtcatttcaggatagtttgcattttcagcatgatttgaatttctgtgaatgtgcactttcctggtgagccttcacgtgtgtgtgagtcccggggccattttccctcctggagtgttcccactgcaaggcatgaagctgatgttcaaagcttctattttcctggttctcctttgatttacttaagctgtatttcccatctgaatttctttcttttttttttctctccatttttaatatttagcattagtatcatcactcacgtctcaggacatgtgtaatatttcttttttttaattaaatattttcttcatttacatttcaaatgctgttcctaaagtcccttataccctcccccaccctgctccccaacccacccactcctgcttcctgaccctggcattcccctgtactggagaatatgatcttcacaagaccaagggcctctcctcccattgatggctgactaggccatcttttgatacatatgcagctagagacaagagctccggggtactggttagttcatattgttgttccacctatagggttgcagaccctttagctccttgggtaatttctctagctcctccattgagggtcctgtgttccattcaatagatgactgtgagcatccacttctatatttgccaggcactagcatagcctcacaagagacagctatatcagggtcctgtcagcaaaatcttgctgggatatgcagtagtgtcttggtttggtggctgtttatgtgatggatccccaggtggggtagtgtccttacgtctcagctcaaaactttgtctctgtaactgccttcatgggtattttgttccccgttctaaggaggaatgaagtatccacactttggtcttctcatctattaaaaacaataaatttatgaaattattaggcaaatggatggatctggaggatatcatcctgagtgagataacccaatcacaaaaaaactcacatgatatgcactcactgataagtggatattagcccagaaacttagaatacccaagatacaatttgaaaaacacatgaaactcaagaagaaggaaggcctatctgaatttcttatgtcttttcagattcacctacttaaccatttcagttttttttatggcttgagagttgcaatgtgtcagagagttgagttttataaacctttaaggtattgcaagttatctagaaaccattgactcgttattgctggaaaaaaaaaagctaaagaacaaaccacaatacataaggttaggtaaatgttagtgtgttctgaaagtcaagtgggtttttttttttttctttttcctttttcttctagagtattctcaaggatctggaaaagaggaaagttgacttaaatggcattacagagagcagtgccgcccttcagcacttggtcttgggcagtgagtctgttctggaagagaacctctgtgtgctcaatgctggatggagccgagtgcggacgtggaccgaagactggtgcaacaccttgctggtaagatgccagaacatgcctgccactggggatgtcttctctaagtagctgcattggaaagcatgcggccctcgttagggctctgtgtgtgtctgctttgcttcgcttgtgcgttaggtttattattttatttttctactgaaaagataccaaaaagaagaatttacagcacctctgataaaagtcaaatattcatgccaaacacaggggccatgttacttaatattttagtaaacatagttttgttttaatgataagagtatttgctagtataatcataatatataatttatacatacatatgcacatgtatgtagaaatgtatatttatatacacacagtcttcacagtgtcttagttatatactagcacagataaagggttatcccagacattgctgcctgtaaaattcttgactactacctcagtgaagttacttacaaactctattctttctttttctcatctacaaaatgggcgttattatcatttctaccttgtatgattttataataattaaatgacttaaaatgtgtagtggtattatataacaatatgttaaacaccctattattttcttttaattataactattccactttcatagtgtttcctggctacttctaccaatgattaacatatggcagcccctatctctgaagtgagagttacaatttataagttattactttattctagcacatcagataggactttaactcagttatttccccagtaatggattggcatagatataagaataagtgatctgtttgggatttttttttttttcaaatcagttaggatatacagggcagaggagctcatgtgcttaggtcttgattgatcagaggtttatattctagtccatgactcattactgttataactttatgcaaattctgtaatataatacatcaccacataccaatgtagagagaaaagtaaagctaaagctggccatggtgatacatacctgtaatcccagaatttaagagaccaaaacaagagtctctaatgataaaggtcaatttacatagcaaggctctgtctcaaaaacgccaaaaaaacaaaacccccaaaacccaataccccttctcccctcagaatagtcacacctggtagcacaggcttgtaagcctgctgcttggatgactgaggcaggaggatcacaacttgaaggtcttcttgggctatatagtaaattcaaggatagcctaaataatttaaaataaaaagtaagaagaggcctgaggtcatattcagttgcgcagtgtatgaggccctatgctcagtctgcagaactttaaagcagtcgcccctccctccaaaataaccccaaaccaaaacaaaccaagtgaaagtatgtagcaaacttcgttctttgttgacacgattgtgtgacatgcagcatgctctttgatggcctcttcaatctctactaagattgccatcttaatatttcatttaaagctcatcagcaccatcttattcctttgcagaaccatcaaaaccagctggagctatttgatggacacgtcgctcacatcagtacctggctctatcaagccgaagctctgctggatgagatcgaaaagaaaccagcgagtaaacaggaagaaattgtgaaggtagtcagcctcatgagtcccgcaggctaatttgctgttctcttgtgccgtgtgctgtcagcagtgtgtgtggtgttctcaagcagtttgctttttggtgggagaaaccaagatcaccatgggtttctatgaccaccacatcctctggtgctgagagtcttcctagcaatctcagatgtttatttcaaatacctttaattcatagtaagcatcttgtgtgcttggaataatattcttctctctctctccctccctccttccctccccccctccctccctccttttactatcagcgtttactgtctgaattggatgatgccagcctccaggttgagaatgttcgggaacaagccatcatcttggtgaatgctcgtggaagcgccagcagggaactcgtggaaccaaaattagccgagctgagcaggaactttgaaaaggtgtcccagcacataaagagcgcccgagtgagtgcttgcatttgtataggatgccatttctccccatggtttatgtataatggtacataattttgttcaagcctattaatttgtaaatgaattttaataactgtttggcaaagcaactgctgttacttatgtgtgattgttgatataagaaaatattgtttagtaaataactcacccaggacaggcttcagagccagttgacagtcgggatagaaagagaatagaaataagtcatttcccaactgacacatgattatcaattcctgatcctaaatgcatccttttaatgtatgtgtttatagaaaatacatgtgtgtgtatgtgtttatatgttgacagatttaaatgttataagttatagactcacagtttgtagttcacagggaaattttctgaattcgctaatttgaaaacgctttatcaattaaaagaagggtcataaataacagctgtcattacaaaatggtgtctgtactactctattattttttcagcccccctgtatctttcccatccccccctctgttattctttattttcagaggggggcaggagacaagctttactgtagagttctcaaggccgagcacagatggagcttgagtaaatgtgaggtggaaacgatgcaagcattttctcagcttagagggagagcggtggacctgagatgcccatgctgagggatcacaggatgctgagcgttttatataatctcatctgtgcacatctggtggcactttaaagaagtagtcaattgaacctcttggcagttatctattgaaataacaaagagaaaagatcgtttgttttatatgtgtgcaggaagtaagttttacctaactttgttttaacttaaaatatctggtatagtgagccacacttttttctatgccccagcatataattattcacgacttaaaacaatacagtcagaccttccttgagcatttgtcttctttaatcttggctttgcctccttattgtatgacttaattccattttatttgtttaaatagattcatgggagggtttttttttttttttgacattaaaaactaagcaaaggacggtgctaagagaaataataaagaaaattagcattgcccctcaaatgacctttgcaaaccactctgttgcttaacaatttttactcactgatgcatgattccaaaatataaaaaaaaaaaaaattatagcattctgtacatgctcccttgaaatggattttaacagtaatgttctatgggctgttataatttgctaggttaactttgtgaatattgggcccttgggaatgttgtctttgttaaaatcatcttactcgtatctgctggctcatctcttactattctgctggtatcggattttagaatccattgagttgttgcagagggtgtagagggccgttccaaacactttcagcaggggctagtggaaaatctgtgcaggttaagaagtgagactgctaccttcttcatagacgctggatgttttattcatttatttttattaaaatggccatttttacttttattttcccaaatgtgatgtttttctctatagatgtgaaaatgtggcatttggaaatacaaatctttttgaggttctgtcattaaaacacccaaggggtgttcttcttggtgggcatgtatgggaggcgttctctagggtctccttgcaccctggagtgaggactggccattgtttctttcatggcttgtggcagggatggttcacatcacggccctgtaggatgttcaccttggcagctgccctactgtgctcgaagcagccacagggaacggaatgcactttacattcctggctccagattgaaaaatgagcagttcgagtacacccaggttgccctaagtcattgctctgtgatgaatgaccttgaagtcatttcagataaatgctggtttctgctgtgaccctgcctctcgggatgattttagaaaatcaactctcagaagcctcttttccttccctagatgctgattggtcaggacccttcatcctaccaaggcttggaccctgctggaactgttcaagctgctgagtctttctctgacttggaaaacttagaacaagacatagaaaacatgttgaaagttgtggaaaagcacttggaccccaataacgatgagaaggtaggtggtctgcaaaccctaccctcgttttttttttttttttctctccttaacaatatggattcatttgcttgacccaccacatgtaactgaagtaatccagatgtgatttatgagagtcactgccgaagctgtcaggtaactcatgcaatgcttgaagttcacatacaacgctcatctaaccccaacattgggaggcagatgcaggaggaatcccagttcctgatcttctctagcgatagagcaagtatgaggatagcctgggctacaagaaacaaacaaacaaacaaacaaacaaacaaacaaacaaacaagcaaacactaatggtggtggtgatgatgatgatgatgaagagcaacaggagaaagaggaagggcaggaggagaagaaggagaggaaacagtggtagtagcagctccaccccctccttcctgactagctgtaatcattagctacgttttgataaattagctttgggatatttgattttccaatataaagtatttgaagaaaatcaagagcagttgtgtcattcaggccgatgtggcttgacccacactgccctgtctgtctcagcatagttcttaacactgaacaatggagagtacgaagtttgtctgtgtatttttgttttcagtaattttctttctttaaatatttagatggatgaggagcaagcccagattgaggaagttctacaaagaggggagcatttgttacatgaacctatggaggacagtaagaaagaaaagatccgcttgcagttgttacttttgcatactcgttacaacaaaattaaggtaggttgctgtggtctccgcagcaaagaaataacttacccagttgtaccatccaggctggggatgtaatatttaaagacacaagcaatattcaagcaaatcacctagggaaattatatatttccccctcactgtctttttaagtttaagtaattactgcttattttttggagttaggattggatcctattcctggtgtatattataggttatttgggaatttcccatcatgcactctgatcacacgcacttcccagtcctcccatgtctgctcccttaaatgtaaaaaaaaaaaacaaaccaaaaaccaaaacaaagacaaggggaggaagtggggggggggagagaggaagagaggaagagaggggagggaaggggaggaaaaagaccctcagaccattttgtgttaaacttacttgtgcatggtctagtcccaatgagaaagggaaactgagtccttccccacccttgccagaagccatcagttgtggagagctacatttcagcatccttatcacagctttcaaaacttctctttgatggctaccttcttaggctattaattttttaggggtagggtggaggtaggggttgtcccagaagcctcggtgttcctctttttcaactgtgcatctgcagacattgaaaatacggcaagagtaatatccttgtggtgttttaagtgatgctgttccccagagctctattttttggtagttcttcctgaaatgagttttatttgatcacttcggaatctgagtggagtcctgtgccttggcttgctgtctaccagctgtctctgactgcacgtgccttgttgtacgatccaatggaagttgccattggtgtcgtccactttccccatttcccttcttagtctatcctcttaaaaaaatagcccgtctgtgtagatggaggaaacttcattaccatcctcacctattttcctgttcattacaggaagcaggacttacaacgattaggctttggactgaggatagtggtctgggaagtgtgtgtctcacacgtatgaggacctgagctgtcttagttcagtctccagtctcagtttatgtaaaaatgttaagcatggtggcacagtgctgtgatcccagtgctggagtggcagacaggaggatcccagggctctgtagaccaagcagtctcacctaattggtgagctctagccatgagaccaatgaaagacccttcctcagtgggtgggtggtggtcctgaggttgccttttggcatgaaagtggcagactgctgatgaaagctgaggcagcttgtggagtttctgtagcaatgaaggttaaaagaagaaaacttatattgaatgttatttttattagcatttattaattgtgtgataatggtttcattgtgacattttgtgcatgtacatagtgtgttttgatcataatcacctgacttgtgtttcttacaactttggttgacattctgggattcttcaacccccccacccccaatttgttgttactttcatgggggggggttaacatacctgcattaatattttttttgaatcttttaatagacaatccctatccagcagagaaaaacaattccagtttcttctggaattacatcatcagccctccctgcagattatttggttgaaattaataaaattttactcactctggatgacattgaattatcacttaatatgccggagctaaacaccactgtctacaaagacttctctttccaggaagactctctgaaggtaaaaatccaagtgcggaatgtccgttgccattgttaatagaaaaagtacagaaacaaggccaatctccggctcttcctgttttgccttttccctccccctctctccctcctcccctccctccctctcttctttcctcctaccctctctccttccctccctctttctctctttcctcctccgttttaaccttttccctccttccctcccttcttttcttttttcctttcccctcatctttttaaagacagggcttccttagatagtccaggctaattggatgctcaccctccttttcttgcctgtggagagctgagattacaggcatgattgccgtgctcagatggaagttgctcttgtacttatttagataatccaaatctttgattactccaaattagcaacaacagtgtataaatagtgagattttactgtattccctggtaggatgcagcatttttttttttcaatttaaaaagcatctaggtctggactcttatgaatgcacatttatttgcaacagcagagatctaattttaatctgatgtaaactcgattgtcatttgtgtcaaatgatgtcaggtcatccatattgattcgagattggctagttgccccgttgtggaattgcgtattgattgcaagttaacattttgagttctttgaaagttttttcccatgtatttgattgtacttctatataaagatgtcgtattatttctgatagattcaataatttattttctcatttaagctacagtgattaggcatttaaaactataattctagaagtgtctcctttttttttttttcacctacatagtatgttagtaaagctacctttcctgtatcctgccttgaagccggtcaggacatctaggagggtgccttcccattcgccattgtgatggtattcctcacattttggtgactctgagatttttatatagaaaagtccataagaaaaccaacagcggcaactaacctggacccttgggggctcccagagaccgaaccatcaaacaaagagcaagcacaggctggacctaccccccacccccaaatgttacagatgtgcagcttggtttgacaattgtctgacctcagtgggagaagatgcacctagtcctgcagtgacttgatgtaccagggtggggggatacccaggtggggcatcccccttctcagaaaagaatgggagtgggattgaggaaagtagccatgcaagggtcaccaggaggaggggtgaatgcaattaggatgtaaagtgaagaaataaattgaaaaaaatagaatcccctcatttgcacacagaacagtaattagccccactattactttaaatgagtgtcatacatgtaactctttatctgtggttctggtgttttgtacaatgatgcgtttgcagagtatcaaaggtcaactggacagacttggagagcagattgcagttgttcacgagaagcagccggatgtcatcgtggaagcctctggccctgaggccattcagatcagggacatgctcgctcagctgaatgcaaaatgggaccgagtgaatagagtgtacagtgatcggagagggtaggtgtgaactaagtgaatagttatctctaagtcacacgagtaccaggccatgcagcgttgacagagtccaagtgtgcattaggatcatggaaaccatttttcatgtatttctaatatgacatgattaataaatagagatgagcttcattccttaaagagaaatgtgtccacaggcacacagccattaagcacataataccttaatgatatgggggcacctttagtttttagcttaaaaataattctcccttttaattagaaaggattttattaatgttcctttctcccacacggcatgattaatgtgaatgaggaacagaagcagcttcaggtaattggaattcatatataaccacaggcccgttcttcccggtttttctgctctataaccttctgcttcataggatgtttcggagtttttttttttttttttcctgttgtttttagacttcgaacagggacctgtgaataggagtaaagaaaaatgagtgtgatcccccccccccccccagtagctgtgaatgtagttaaatgcaaatacaacatgaaatagcccaacaacaacaacaacaaaaataacatgtaatggagaatttactatagagcaatacattgcaagtattcagatacgaaagcaaggaatcatatggttaaaatttttttaattcatgtgactgtttaatcagtgaagaagtatgccttaatgatctttgttgctatgtaaatttataatatggtctctttgtgtagttagtgaacattcttttgtacatttatatatatgtgtgtgtatatgtgtgtgtgtgtgtatttttgttgttgttgtttgtttgtttgttagaactggtatagtagttactttcttcattggtgacacaaatgttgatcaaagcaccttaaaaaggaagggttgttttggtttatggtttcaggacacacacttcgcataacaggcaagacatgatcacaggagaaggaggttggctggtcacatttcatcagcaatcaggaagtgtagagagaacagaaagtaggataaaataaaacctgaaagcctccaccaagctatgtgcttcttccagtgaggctctgtcttctaaagattctccaaacagcgccacctgctggtgactatgtgttctaacacacgagcctatgggtgacatttcacattcaaatcacagcacttggttattacatgaagacaattaaaaaagcaagatgttgaaactcgatttgtattataacatgaacttggctactgtaccctgccagggatatttataaactcacccttcctttagaagcctggctattattggcaggaatatttctccaatattacagtgatagcttcattgttgtctttctttactgtgctctcaatgggacttgaagtttctttgtgcccagtaatggctcatctttgaaaccaagggagtaatacttactgtttaaaattgtttttctaactggaagatattatttatgtatatttttgtttatttgtgagtatttacagccttttgtatgtcactcaaaatggcctgtaccctttgacgtagagccaacttagttttatgaaattatatcttatagttgtttcctttatgattgtatacagttaacaaaacttacatatccattccttacatttgctgtgtctgaggaaataataatgtatggtttggaaacaatcttagttgcttggttttgattttggtatgacctctgttcagggcccagctcaggagcctttgtaccacagcttcagtaccatgagtctgtgcatgcacctctactttccaaaaacccttaagcaactttttgtgcatctctagataaatatttaccagctctaatttgcctcattgttcttaaagaaatgaccaatgtctccccataagttttcattgtccttatagttagcaaaaaatgtcataatttaaagttatgttattgtgtattaatttagtggtgctaattatgctttgatgcaccattcattttaactaaatgctatatttttatttgtaatttgtaaaatttcccttcaatgttccagaacagttactcttttttggccttcgttttaacttgtttttactttgtttcaacttgaattgaagccttctatcactgaaaccacatactttcgaagagaatagaggtagttaatcatgtgtttctgtttcactatacttaaacggtaagggtataaatttggatggattaacatgcctacaattaatcaaaagtggctgtgtaagtcagagaaagcaaaaacctttttgacataacacattccatttaaactcttcggtttaaatcagatttgattgacttattactaggatgggtttgaaagagaggttacttctggattgctctgtgaagcttgaagctccactgagtctgtctctcgtgctccaggtcctttgccagggctgtggaggaatggaggcagttccaccatgaccttgatgaccttacacagtggctatctgaagctgaagacctgctggtagacacttgtgctccagatggtagcctggacctggagaaagccagggcacagcagctggtgagtgtgtcccatcctgggggcagagtgtgtgtgtgtgtgtgtgtgtgtgtgtgtgtgtgtgtgtgtgtgtgtgtgtgtttggggggtggggtgggaagggggaggcagggcatgcaggggcagggcgggaaggtcagatgcttcatagattgttgtaatttttaccactgtacattttttcctacatctagttcccagttttaaaattctaagaaacactggtcattatacaatttatttatttatttattattttattttatttttaatttattttttacattccatattccattccctgcccttcatccaccctccgactgctccacatcccacatctcctccccaccccacaccgtgtccacctggatgtccctaccctcccaccccacctgacctctaaactccttggggcctccagtctcttgaggggtaggtgcatcatctctgaatgaaggaatccctgcagtcctctactgtatgtgtgttgggggcctcatatcagctgatatatgcttctgtttggtggtccagtgtttgagagatcttgggtccacgttaattgagactgatggtcttcctacagggtcacccttttcctcagcttctctcagccttccctagttcaacaacaggggtcagctgcttctgtccattggttgggtgcaaatatctgcatctgactctttcagctgcttgttgggtcttttggagggcagtcatgatagatccctttttgtgagcattccagagactcagtaatagtgtcaggccttggggcctccccttgacctgaatcacaccttgggcctgtcactggaccttcttttcctcaggctcctctccatttccatccctgtaattctttcagacaggaacaattatgggtcagagatgtgactgtgggttggcaaccctctccctcatttgatgccctgtcttccttttggaggtggactctataagttccctctctctactgttggccgattcatctaaggtccctccctttgagtgctgggagtttctcacctctcaggtctctggtgcattattgggggggggggggagtgtcttcccaacctcctatttcctgaggttgcctgtttccattctttctgctggtcctcaatctttttccctcacccaataccagatcaggttcccctcttcccttcccctcccctaacctgtccactttcctggcccccatcatacaatttataatccagattttaaagaagtttttaaaaggataaggcactcttaggttgttaatgtgagagatagttatttttaaaaatattttaagatatatttctcctcaggagattttatattcatactaacacaaaaaattatatctaagactatatgaaagacagaaaagtatgtgtatattcaatgtcacctctgctttgtacccctaacacctaggcatcccggttatttctttttccttttttaaaaaatcattgattattgtcatgagaggatgctgttctttatggacaaagccagcctcttgtaggactcagcctcgagactatgtagcacccagcagtcagcctgccagcacaataggtcactaaagggagaaatggagcaagcagaagctcagatgtccattgtcaaatgtatttcttgttttagtacattttcaaaatgtattttctctagacagttcatggggcgtcgaaaacaatgcctccccctcacttgcagacatggtgctgcggttttttttgggtgtgtgtgtgaaagtttgagttacaggtaagtatttagacttgactttgaagtagaccttaatctgtgactttaaaatttttacagacagaggcagcatctcagtaaaatgcacattgaggattttttattataaatggctggacataaaaattttattgaccaaatatttgtgtgtatgtggtatccacatgtccctggaaatgcaattttaaattctttgaaaagacattatagccctaccccgaatttgtttctgtaggtgttagattgatgcttaaaaacttgggtacactgaaggtatctgaacagcttgattgagtggtagaaattcataatgtgtcatctgtcataggaactggaagagggcctcagcagccaccagcccagcctgatcaaggttaaccgaaagggggaggaccttgttcagagactccgcccctcggaggcaagcttcctgaaggagaagctggcaggtttcaaccagcgctggagcactcttgtagctgaggtggaggctttgcagcccaggtgatgactcagctctgaatgttttgagcagaggggcgaagatttcatgtaaactacatagaagctgatctaataccatgataaaaatattagtggcatttgaggcttcactgttcatgttacttaggacagtttttaggctgtcttgtaaatcttactgttctgttcagatttcctatgtataaaactttctttggggccagggtgatggctcagtcaataaagtgcttgccacgcaagcacagagagccttgcttagacctccagcacccgtgtgaaatggtccctgttgcaaagagaggtttctttgatgagggatcagaattatacttatctgggttggaagaagttaaatatttagattgtacttatgaattatgttgatttaggcaagtggcggttgtaagagcacatccaagttccatggcttcactaaccttggatagctggataggtttccagtatcaggcatagtttccattttttctgaatgggctttatgcccagttagagagctattagttgcataaaggtattgttgcactcttgtacccttagggttaatgcattgtgctggtcacccaccacagcacttatggtcactgtttcctttctacaaaagaaagctataatgtcagacagttgcttgagggttaaatgagactgtatttgaaaaatgtgtatgtcttaactttttatggcgaacatttaaaatatccatttcttataatcctttctcgaacatattctcccagcgtgttgttgctgtgtattgctaatagtcaattaatgtaatcagctttatcaatattctctcgcactgagcattcagatgttactatgaactcagactgaaaagatgaagtagaaaggaaaaaagcgtgatcaagggaaacatccacatgaagatgttgacacagaggcaggaaagatgagctatggaattgggtactgatgaagagggatgctgaagctgagtttcgaggcatttatagcaattttctgtacattctttctagggtgagcctttgtggcagctagctttctgcagcaataatgcataatcaagatgattagcttataaagagagaatgtttattttggttctcagttgtacgggtgccagtctgtgagtgtttagccccacagctttggcccttctctgggacattgtggttggggtgcctgctagagcagacagcttgcttcatggccaggaagcaggagagggaaaaggcgactgaggttcctgtgtcagcttctccttcaaggtcacaggccccatgtgctgaagactgccatcaggttttataaaattgccaccactgcccagtagcctcaggggcctctaggagatttcagacgaaactggaaaccttcttgagagaagatgtagaactgggctttgtgagtaccacacccagggctgtgtgagagagatgggcagatgaggagacaagataggaggactcgatatcacaagggaaggaattcatggatcatcctttcctacaacaattaatcagattattgttatagtaatgcattaatattaatagtaattttaccactactactattgtcaatcaattcatatatcatataataaacagtacatacttaataataaaatagcaaccaattaataattatatcaataataaaattattaacttatataataacataatgataagtggctatttatgtcttcttaaaaaagaaaaaataaacaaacctgctgctggcaagatattaacagctgcagaaatacccctcaattttcaagtgggtttctgtggagtgtggaagccattcttccccaacctacaggatgacctcgacccacactttactcaagcttttggaagtgaatgcagtaatgagtttcttcttagcttcttgtatattcactaaaacaatattggttttcagaaattcgtagtgaacttcactgtttctctaacctgtgtgtattggggtcactttggaagccccagaggttcagggtcattgacagttaccacactgcttcatttctctgtgtattcagtacctgcaggtaaatatttgcacatttacagtttatggtgtcattccttaataagcaattcttatcctagaattgtttctactcttaagaatagcaaagtgtacattatatttagctggtttacagatgaaaattacttggtaatattagtttcttttatagttctagttttagagcatgaaagtagtcatgattatgaaacactggcaatttaattttcaatatatctgaaagaaaagaactatacaagtattatggagtgtttctaaagttgttagattatttttaaattacattttattataatttctactaccgccatcattgcttcattttttttttaatttcaaagtgcatcttcttttttttcttcttttactttttaaaaaataagttacattttaagcaatttttattaggtttaaatagttaaatattatacctttccattatgactgttagtactatgtaacattaacatataatatcacatattagcatattgacgtaatacatattacatgcatattttgttgtatgtattatattgtattatgctttttatggttaaaatataggaggtggcatgagaccattaatttccattagggatggcacagtgtaatttattaaagtgtcacactcagttttcaatcagcgtctagttgcagtagcttaaaagtcatgatcccactaagatcttaacagctttcaaactctctctctctctctctgtctctctctctctgtctctctctcttaaatctgcaatcttatttgtcatctgggttctgatcacacttcattgtctggcagatggctggtatccctaggtgttcttcttatactgttaggaagttctaactgggggattctgatgtcatagtcatcctgtggcctacatttatcttttggaccttggctggatttttttcccttcatctcctttatgcaatatgacatcctatgcatatgttatccttattttaatgaactaatcaagcatatatgtttgtagaagatttcgattctcagtactcatatttttgctgttatatgggtagaatggacaaatactgctatcttgttgtatctgcgttggtggcgcacgcctttaatcctagcacttgggaggcagtggcaggcagatttctgagttcaaggccagcctggtcaacagagtgagttccaggactgccaaggctacacaatgatgtctttctgtctccatggagaactcagataattattcctttttccttattttacacaaggacatgttcactgttcgttaactgtattatacagcaatagctaacttaaacattttcatattaacttgccatttaatttttatgatgagaagataagacttctcagtgtgtctgaatttaattaaggggaaaaaatccctttagtcctatatgtaatttttagtatggtactctgtatgcatgattattaatgttaatttaaaaactacatatttaatatcattattagaaattatttctactggggctatggggagcaagttttctaaaacaaatatattgttttgcttactcagtaatttctgtcaatattttccctactgtgttcttttaggctaaaaggagaaagtcagcaggtgttggggtataagagacggctagatgaggtcacctgctggttaacgaaagtggagagtgctgtgcagaagagatcaacccctgacccggaagaaagcccacaggaattaacagtaaggagtttgtagctttccagagccttcgaatgcaggatctaatgaacttgggaaataagatcgttttgactgaaattgagagggaagtacaactttgttctttatgataagtatggtaaatttgaaagagttgggattttttttcccattattttatactattttggtcatgcagagatcaaacaaaagattagtaaccctgaccttgatgttttattaaaagatgtagactatcttaaagtgacttagaacacaatgcagccatgaagaatagtttctgcctttgtattgaaaaggtaactgtgtggtgacttacaagaaaatcctgggtgttgtgcagttagcgccttgcagcttgaagcaggcttagagttacagttcagcaatcagagtttcttgttgatttgtagccaacagggatttttaatggttgtgcatctgtgcacatgcatgcacatgtgtacacagacacacaatctataaaaatatataaagatatatagatatctaaatgccaaatctccataaatattcaggtccatgagcatctgtagtctctattaagaattgagacattaatagtacaacgttggacaggatccattttctgaaagcgtcacagacatggcaagatggctcatcagataaaacactcactgtggtcatctggtaacttggttcaatcacccaaccagtggtaaaaaaatttagatatgacggtgtgcctctggagtgccagcctttttgcagacaggtgctaggtagagacaggagaattacttagatacatgagggccagctagtctgggtactcggtacgagagaaatcccacttaagtaaggcgaaaggagggaactgactccccaaatttgtcctttgacctccacatgtgtgtgtgcgcgcgcacacacacacacacacacacacactcacatttaaaataataacataaaaattgtacttgaatgtgttaatatatatacatatacatacacacactcacatttaaaataataacataaaaattgtatttgaatgtaattacacatacacactcaaatttaaaataacataaaaattgtatttgaatgtgattacacacatacacacacattcacatgtaaaactatgttcaaaaaagtattcaacttatttgagaagtggttttgtcatagagatgtatggttaaagtatcttgagaaagaaacttttagtgatgatgggaaacgtgggaattgttcattaaattttttttttgaagtatgaggatattccttctttatgtaaagagtcaagaattttcttcaaatatcctgtttataaagtatttggaaaatttacaaagggtaggacagcatgttaagatgaagaaatttagtggtgatcatgatgtatcttaacaatgtaaacatagtgtgcgcctggtgaagtggtgctggtcctagagcgatggcccagcaggccagagcactaactgctctttcagaggccccatgtcaggcaggcagcttggaactgcctgtaactagagcttcaagtaatctgatgccctctcaagactgtgaactcaagtgtagagcccttccaccaatatatacacttggttaagaataataaaaaagagtatgtgtttgtgcatgtatattcagacacatacacaggaatgtacattcatgctctatcagtgagagtgtgttaacaatttcggtaagctgactttccatttaagatgcctgagtcctgaatgtataaggatattttcccaagagaatatattgtgtatagtaactctccctcagaacaaccttctaaccatggctgttttttgtttcaggatttagcccaagagacggaagttcaagctgaaaacattaagtggctgaacagagcagaactggaaatgctttcagacaaaaatctgagtttgcgtgaaagagagaaactttcggaaagtttaaggaatgtaaacacaacatggaccaaggtgtgcatgtgggaatcctgtaacgtgttcctcttgtctattgacttttagaattatacttgctttggagtgtgtgtatttgtgtgtgtgtgtgtttgtgcgcgcacacatgcacatgcaaaggggggggggcaaacagacagagacatagagaaagtaccacacataagggaacaacttttgggaattgatctcttctctcatgtgggttccagggattgagctaaggctgtaaggcttagtgcaagcaatcttaccagatgagccatcttgttgacccctatttactgagtccttggttaaattgttctcttgctattgctctaagtgtacagatacaggtctgacatatgtgtgttttttcagcactttacaattatacacacacacacacacacacacacacacacatacacacacacacacacacacacacacacaatatatctatatatattcatccactatcacatgtattctcaaagaatatcttttatttcacatggacttctttgttctaggggatgtgtatattttcaaacataccacatatgattgtctattggaatttagcagtaaaatgccagtaattatagtctgaaaatgaagaccttaaaatagcctcttgatgttgaacaagactttcccacatctgtttatttttggtgattttttttattcctttagtatgtttttattgttaggatcctgtggaatttaataacatctgacaaaaattaaactaagatgggagttattttccttatatgattactttgtttcacagaggaaatggttaaaggtagatgaaatcataggattcttctcattttgtcttagtacccactgggtcgatgtatggtgtctatttgaacatggaatggatgtgtcccacccgggactgccagtcacttgactctcttttcaattctatcaaactggaagtcctggcgaatgtgttggcatgcatcagtagctctgacatttgacatttactaggctaaggtaggaggagagtttcttcaaagccaacctgggctacatagtgagatcttatctcaagaaggaaagagtaagaggaaagaggaggaagacgagctatgagaatgaagtggtattatgctgtatctaacaacctatgtgtgctttctagacccagcctctgtgactatgagttactgtccaagtgatcactcgttatctgtatctctggcctagacctttctctgtattcggcacttgaatgttcaatgtctctgctttgggagctaatagatgtctcaacagttacaaaattgaactcctgatttctaccttatctttgggccttagtgtatatcacattcctcaattaatggcatgtatgtctctattgttgcctaaatcagaaatcctgaatcattaaaatggcacataaattatatatgtgaattataactcaataaagagacatttcttccttttcttacacacccagacacccacatccagacacacacacacacccagacagacagattcacccgccaccccccaattctttgatgtccctgtcattggctttttccatggacttgatggatagtttgatagtaggcagctatatgtgataaggcagatgagggcaaatttttgatgtgtagaatattggttgtgcacgaatgtttctgcacagttatttcagttttctttatgttagaaaaataatggcataaattggacttcaccgctcctttgtattgcttatcccaagccaccgtcatctctgggaaagccctccttcctggtctcttctgccaccctttctcattgtcagagcacagcagccaaagctttgttaagatgtaagtgagatccagtaactctctgaacaatgtccactaacgactttccgtcttactgagagtaaaagccaattgtcctccgtgtgatttataaggcctctcaccctgcctagctgctctctctgagtttatctgatgctctctcttctgctctccactctggacatattggctcccatgtcacttgccaaatccatttgcacgtattcatccagagcatacatttttatggaacacagagggttttgcttggtattatagattaaagggtattgtggccagttggggaacaccatgataggcagcattgaagcttctattactgctggaattaaattaacataggttttagtattgcccactttgggtaattatgacatctaaggcaaaaaaaaaatgcttcttgtgtggggaatcatgttaggaactgctactctggaatattttattccttcaattcttttatatacttagcagatttcactacacccctggttcatgcaaggccccattttaaggactataggaaattttttatcacccagttggtttgacatggataagacaaagagatcaataattaaaaattggaagcaaggaacattcaggggacacttatatactttcgagtgatcaaggaaggcctgtgggagaagatcttatctagcctaagttataaaagcttcactgcttaggtgagggatgaagtaacaggctttgacggggaagtacagcaagtggaaggctctagaggacacaccgtgagggaagtgcatctgtggtctacaatagacttatacataaaacagtcacccgagagatgcccagtcactccagagaccagatcctggtttattgagcaaatgtgccactctacagaattcgggctctatcttgagaagaattcactactttgagggaaatggacagctattatttatttataaacagatttctgttagaaagaccccatagctatactgtagggaaggtgggctcagtgtatggaacaatcaggtagagtttcaagagaagcttaccaaaggcagtttcctggaagacagaaatcgtgaactgaggtttggatgtgtctaaagatctattagacagaaagctgagtggaagatatattactgggggagttctttagcctctgaagcatccatataggaaatgaagagtaagaaaggtcaaaggtttaacctgcacagcaatggcacttgatggacagtgaaggaaacttaagagaggcaggaagaaggtcagactcactgggtctttacaggatttgagttgtgaggggaatgggcagctccagtggtgcaagtgtcacacatgaggactggttggcatccttgcgcttactgtcaggggaggtaacctgccacgaccacacatgcttagtgtgtataatttgatcctgatcataggattttgatcccttccaaacccctgatcgtggagttttgaaggctgcatttcccaggaaaccatgtcctagtaacatcacagtggatagtgaaggtggagatgcaagctagggtgggaactgaaagaaaattgattgagctgtcgtatggaagagtggctgtgtttcgaagatacaatcatcgtttgtttctcttgtgtgtttggcttgatgctacaggtatgcagagaagtgcctagcctcctgaagacacgcacccaagacccctgctctgccccacagatgaggatggctggtaagaaagcatttgctctttaggagtcatttttatcaacacagacaaacttatagtgggaacatcctattagaagaacttactgaaaaacatcacgtgattgctgttcataatctgaatccagactggatgcttagcatggggaaagatttgttgttctccgagtcaaagatatatctggatggccatgggtcctggtgaaggaaggaaagaggggctaggtggaaaatactgagttaatttaatggagagatgcactttttcaagttatcttgtgtaacctgccatgacaacacatgtttagtgtgtacaatttgatcctgatcatagaattttgatcccttccaaacccctgactgtggggtttcgaaggctgcatttcccgggaaaccatgtcctagcaaatattattcccttagttatggggaacattgtatattttctcatgattcctgtttatttccttctgtttctgtcccaagtagaccatatagccactgggactatggccttgctcactctcctacccaccacattctgcttgctgtctgtagtccttagctgtactaaccccagccacccacgtctctttgccagctgaggctggaggttgggactttctcactgtttttcagtgcccccctcatctctcctcctctcctcaactctgcctcccacctgccgcctcctacctgggctcaccttgtccatttccacctcttcttctcttctttatatcttcttcttttcctttaaaaacaatgtgtatttccttcctgatattgcagcattgcttatgacccagtgtgtgttctgcattacttattttcctcagtaccttgtcttggaaatccctgtggcctgattggttttcttgattatatttagaacaattgaattgagatttgtatatatgtatctctcttcctctctctcatctatgtatgtatgtatgtatgtatgtatgtatgtgtgtgtatctgtcgtatgtatgcatgtatctatgtatgcatgcatgcatgtatgtatatatctgtatctgtcgtatgtatgcatatgagtctgtatgcatgtatgtatgtatgtatcatctatatgtatctgtcttgtatgtgtctatgtatgcatgtatgtatatatgtgtctatgtatgcatgcatgtatgtatctatcatctatatctatgtatctatttatgtatatatgtatgtgtctttgtatctgttgtatgtatgtatgtgtctatgtgtgcatgtatgtatgtatctatcatctatatgtatctgtcaatgtatctgtgcatgtacatatgtatgtatgtatgtatgtatgtgcctatgcatgcatgtatgtatctatcatctatatctatgtatctgtgtatgtacatatgtatttatgtatgtatatatgtatgtgtctgtctttttgtctatcttgcttcaattctatgaccataaagaaacagcttgctttattaagtacagctgcagaggtttaccttttttagaacattgacaaaggagtagaaaaagtttatgtacatccttagattataaaagaccaacagcaaaaccactttacagtaggtttgcagtttgttttccttaaggcaaccctccataaaacaggtgtgagacctgaagccaatttcagtatgactttccttctacagtgttcttgttttttttttttaagtctaaacacaaaatgtaaaaatctaaatgaataattttaaattctaagtaaaaaattttaaatgtagaaaatgatgaaattatgtgtttatctgtgtttgtacatgagtgtaggtgcctggagaggccagatccactggagctggggtggaatggccattgtgaaatatcccacataaatgttgggaactgaatttaggtccctaacaagaataatatgtgcttttaacttctgagccatctctccagcccttacacaactttttagtttaatatttttcttcttttaaaatcatattaaaagtaaaatgatctatttttaaaataaataattcaaggacatttagttcattgacagtgttgtacaagcttcacctctatgtagctccaaaatatttctattctcaagttagagttcttgtgcttgagtagcttctctctgctcctccctccgacccccagattctcagcgtctggtatccaacagtgtgcatgccagccatgtcagcagattggtccatcttgactatctcgtataaatggtgtcacacaatgtttctttcatttagcctagggaacttcacaaaatttttgtttatctgtatgtttaaaaatggcacaggctgggcatggtggcgcacgcctttaatcccagcactcgggaggcagaggcaggcggatttctgagttcgaggcccgcctggtgtacaaaatgagttccaggacagccagggctatacagagaaaccctatctcgaaacccccctccccaaattggcaataaccaatctattatgcttttaaaatatatatttttataatattaaaatctactatgtttcaagagaaagtgaaaatgaaggaagtgacattgttttgcctttttacaacctaagtatctggctttgaagatgatatctaccttctcatttatgcttctgggtttcatctgtaaagatggtgcaggtgatgtgtcattatatacctgggggagatttaaagcaaataagtatggtggtggtggtgctattaccagcatccagatatcttggaagaggcacagggaggccagtgcttgtcagctgtcactttgccaacctgagacctgcacactttgctgacctgtgattgcaaaacattttgctttaattagtgctttctctttcatgtttcatgttgaactgctgtccctgttatctgtgtagtaggttatctgtcgcctcgtccagagctctaaagaataaaagcattttgctcactaattaaattcacgtgcctagcaatcacctcctttcttagtctttcagagatgtttgaacggatcggtctctggtgctttccttagacgtttagagctttaatggtgcattaacaagtttgcctgtctttgtgttgtgctctcgactcataaagatattcttctacgtcttaatctgatagtcatagtttttccccttcatgccttcatctccaggtgtctattttcctttatgcacatgaggtcagattccgtggcatcatcttgccatactagctgccagacagcagtgcttacggggtagtgaagtctttagcatccttccacaatgccacttctgtgtcaggtctttctgtccctgtgccttatggttctcctctcctggtcatctatttattattttgggatacagttatcattggtcaaaagtgtaactcaataattgtagggcatatctccttacacaaatatttttataaatttttttgggggggaagaggagggtccctttctttcttattgaacaactagaaattagtatctgtgattttgccaagctgcctgcatacctgttggggtttttattagaattgtactgaatttatgctaggtgccaggtagatttagtattcgtcttaactacatcttatattgaaaccaactgttaacttctcttagaaacaaaagaaaaacaaaaacaaaactaagaacaaagacagaaacaaaaccaagaacaaagacagaaacaaaaccaaagggttggagaggtggcttagtgtctgatatcattggctgcttttccagaagacccagaattcatccccaacatacacatgaccgctcacatctatctttctggggattgggtggcctcttctggcccctgtgggcatcaggcatgcgcatgttgtgaatatctatatctgtatctgtatctatctaatctccagacaaaacactcatacgtgtaacagaaataaaaccaagcacaaaacaaagagaaagaaaatatttatcagttctttggagaagacaagaattgattttaatacctttgggaggacatgtaagatccttctgctcactgtgaaggacaagggtggattcctctgacagaaaggagtaaataaaattaaataaatcaaataaataaataaataaaaatgaaacaataattcaaaaaataaaccaaataataagtaagaacaataataaaataataaacaataataaataaaataaatataataaataaagcaaaaccctaggaggacagcccctctcagaaagagtaatgaaattgacttcctcaagtttgttaagatataagtaattacaaagtagaaggacttagggaggaggagaaagaggaagggaggacataacacattgcaaaaatgaaacaggagaaaacaaacaggccagacagtagcatagctttcatctcaaaggcatccaaattgataaagaagtagattccaaagaaacaaaaaccagactaatacagatactaactataccactcggtgcagaagcatgaaaacacctttattagtaattaatccattacagtaatggaggcaggtgtgtactgagatggagtcctgttgatgtagatacagggtgtttagctagttgttggagaagtgaattccctttggcaaggagattaaatacatgaatttaaaaatgttgtctgacccagtgatttctctttgggaaatctctactaaattggaaactggaaatgtggaaaatactatactcaaaaagagtttccctttaagctctttggtaaagaatggatttcaggagatttgtacatgtacagctcaatgtgtagctgaaggaaagggtgctgtaaaagtcagtgactatttgtgtaaattcttatacagatcttcacattatagttagctaagaatgagatatgcagtccaggtgtggtagtgtgggctttcaatctctgaactcaggaggcagagaaggttggatcgctatgagtttgaggccagcccagtctacatagaaagttccaggtcagctagggctacactttgagactctgtgtctcagagagtgtgtgaaacagacagaggcaaagaaacaggagataaaaataaaaggtgaatatgctgtaaagttaaatgaaaagaacagaaaaattagaaataaatttgctttatatttacagtagcctgactcaatgaaataatgcttttaattttatcagtgtgtgtgtgtttgtgtttgtgtgtgtgtgtgtgtgtgtgtctgtgtgtgtgtgtgtttgtgtttgtgtgtgtgtgtatttgctttgtttactgctttattttttgtgttaatgttgattgcatgtgcattattgattgcatggaattttgagagggctgtgttatattggatctatggctattaaatacacgtggttatttcaatctatgccatttcaacataaaaataccttcctagaaaaatggaaatttacttagtacacaaatgcacatgccctcactacatatcttaaccattgcctcctgttgattattttcaacttgctacatctcttgtttcagctcatcccaacgtccaaaaggtggtgctagtatcatctgcatcagatgctcctctgcgtggcggcctggaaatctcggttcctgctgatttggataaaaccatcacagaactggctgactggctggtattgatcgaccaaatgctgaagtccaacattgtcactgtgggggacgtgaaagagatcaataagacagtttcccggatgaaagtaggtgcagaatgtgaagttttgccagggcactacgctctccttgggtctctgtggtttatcctaaatttagagaaaacaagcttaccgatattccttatctgctgggtagcccttcagggttaactccaaagagtcaagcttttcttcagttagcgcaggttgatcaaatagaactgaaggctcagtgtaaaactctagtattgatactgtgaagctggacaccacataactgtaagctacctttccatttaatgcgcaatgcaatatagaataatttctaagcctatgtttcatcttagatttcataatgagtacatttcatttctgatcttagaaatgaatgtgttctgatgatatgttttttttttctcttatagaatagagaccaccaagtagcaacctggaaaattctttttccatacttagtatatgctaggctatagcttatctgttatatagagtaaggctgaaaagaatgttttagatagatatgcataacaaaataatagctattgctagcatctaagtgcttaatgtgtgttgaacattttcttactttcacatgtattgtcttgtctatatcataacaatctggtatggtaggtgccaattcattcccatatcaccaagaactttgaacttctaaaccagtggttctcatcctgtacgtctgacccttttggggttgcctaataccactggaaaacaatacattccaattcaaattatgatagctaaattacagctttgaagtagcaacaaaaataatttcatggctggggtgtgtgtgtatgtgtgtgtgtgtgtgtatgtgtgtgtgaccacaacccgaggaactgtattaaagggtcgcagtgttaggaaggttgagaactgttgttttaagaggtcgggaagatgggcatatcaagcagatggttttctctgacaaaatagtttctaataaatgtcccaggggagtgtcagccacatgttagaggagacaggccaaggaggggctgtttcagtagccctgggatcaggaggtgggtttatgagatatttaccgttctatcataggggacaggaggcaggggcttggggttgatcaaatacttagagccggcatttgtgcaagaagtgtttttgtttttgttttccccttatggaaaagttaacttagttctttgagaagaggcatgcgaagctgttcacagcctcgtggacgtaagagtctgcaatcagtagacaagcgtgctcggccgtttctttctggttcctgattcgtggctggggactgttgataataatgctttgctttagtagaagatgaggatggctcggaggcaggagatgcttaagtcagggaaaggagcccttcctgaggggctgagacgatgctgtttccagtagaggaagtagaggaagtagagggaggaggaggaggagaagcggagctccagtgaccctctgagtgatttagctttgagtctgttgtgcagagggaagaaagtcagcagcataaacggaagctctgggatctagagctggagtaggagtcgttcatttggaaatacttactcctgtaggagtgattgaggtctagagaagtagtttacccgcagggagccggctggaccaatcttttggcacactgtttgtaccaactgtgaattgtgttttctaattctttttggtatttattggttctagaattagaatagacttttcctggaattcttagccctcactgtatttatcagctaagacacatagtccatgaaaaaagggtggtttatgaaggtgattcatttgcagttattgtaattattgcttttctaacatgccgttttcatctttctacaccagtggttctcaaacttcatcatgctggacccctttaatacagttccatccataacatcgtttttcataactgtaattttgctactgttataaattgccatgtaaatatgttgggagatggaggcttaccaaaggattgcagcctacaggttgggaaccattactgtagggcatccacatgtgcattcatatctgatgtccaacaggtacacaaggagtcagtagcgaagattgctgatgttttgagagcatttatagtgagagttccttgatttaatttccttagatttgatggaactgagctgggggagccaatggagagggcagatgccatttctggttatggaagacctgagatttgaacctaaggcctctgactccaaatcacatattcttcctctgttacatcgatgatgtttcattgcctcttagaggaagaagacacacccaatacacagctaggggcttatctcaggatgcattaatccctttgaacttgtctccttgcagatcacaaaggctgatttagaacaacgccatcctcagcttgattgtgtatttaccttggcccaaaatttgaaaaacaaagcttccagttcagatgtgaggacagcaatcacagaaaaatgtaagttaaaaaaaaaatgtcctgcctggcgtggtggcgcagacctttaatcccagcactcaggaggtagaggcaggtagatttctgagttcgaggccagcctggtctataaagtgagttccaggacagtcagggctacacagagaaatcctgtcttgaaccccttccccccctccaaaaaaaaaaaatgtcctttatagtatcagctacttcccttaacactcgcaaaaatgtcttcagagattatcctactagaaataaatgttatttttagaagaaaatacttttttctctctttttatcttcaagtttttgaaagtcttttcatacctattcctcccttctgaactcttatacatttaataattttttcttttattttaagaattttttctattttttttttttttttcttttgagacagggtttctctgtgtaacagagccatggctgttcttgaacttgctttgtggatcaggttggcctggaagtcacaaatgcccacctgcctctgtctcctgagtgcggggattaatggcatacaccaccatgcctggccaacattgggatattggtttaaggcatctaatggaataagctagctaaactcatagtcacataaatccattctgccattgtgccttactcacggaaactggctgtcaccatctcttaaacttccgtgagaattcacttcgtacttgctttctgatcggctttcatgtggggatgcctcagttaaaaagaaaattaaacagccaataaaaagaatgggtggaacactaacaaaccagagtctctgtttggagttagtgttggagctgaggatctgtgtcgcatgcggaactggattcttaacgatggtgtctggtggctatcatagtctttctcctcagcccctgtcccctgcagacctggcctgctccggatccctgttcaaagtccctgatatttccagccattaacttttatccatattctccccgcccaacctcaattttgttcttctcctggggtgagattactcagcagctaaagtgtccctccctctgtgagtccttcccacccacacatgctcccctgtggactgcattttctatctttagttcttgccacagcctccttccccatcagtttcctctggatcccatagctgctttaatcttctttcccattcccaggctatgcagactcaccttcctggtctctggtcctcccacttggcagaccatgagggactcagttaaatacacgtgagaatgtaaactaggcgaataaagttgaatttttcttaagggagagcattcggctataggcttaatagatgggtttggctttcaaaataagtggaacaaagtggttcctgatggagacagttagcctggggactttgagtgacagatggcgttgatttattttcacttaaacagccactatcctttagtcttcctgattttgataattgatcaaatatggatcttttatgatggagcactccgatatgagggagcactctggagtcatctttcctccctctcttggtaggacatcttctctgttcacagcaccagaccatttctagccacatttcatttttctttctgatcatcttatcaggactttatttttttttcctgagcaggtggactgctggctgagatcactatatcaagcccagacagtgttgctgactgagcctaggatcttgggcacgctaggaaaccactcttgcctgagctgcaaccctagcacacacttgtgctctctctctctctctctctctctctctctctctctctctgtctctctctctgtctgtctttgtctacctgtctgtctttctgtctctctctctccctccctcctttcctccctctccctctccctctccctctccctctccctctccctctccctctccctctccctctccctctccctctccctctctctctgacaacagggtttctatctcctgaatatcttcccttatcacttatttctgtctctggtctttgtcttctcctcctcttcttcctcccctcgtcctccccactccccaactaattaatcttcatcattattgtatgcaaagagcccttaccagctcctgtggcactaatagtaacaggtttatcatttataatgaataggataatcagtttattttttatgataggccaatgatatttgctgtcactcgatacttcagcttgtatttgtgcaaaccaatgaactgtagcagtagttaaattggccataagtatttagctgagaattagactatcatgatagtttggtcttttcttcccttgagttaaaactttcagtaattttcttacattattaaaacaatatacagcagaggatctcaatggatactttttataaattataactcactgaacaatttaatggaatttatgacatgtaagtctctcagacttctaaaaaactccaagtcgatagcctcatgatttacaatgaccatatgtaatcttaggaattttaccagaatgttacattgtaactaaacccaatcttttcagttttcaaaaactgtacgtgtgtgagtgtttcgcctgcttctaagtctgtatggcattgaaatatgtgaaccacatgcatgcaggtgcccatggagaacagatcagggcattcgatctcctagaactggagtaacggatcgctgtgaacctccgtgatagtgtcggggccccaacttgggctttctgcaggagcagcaactccagattcctggctggagtttgtcttgtagttaagttcttcttgggctcgttcttctgtacctttgaggttgttcagcctccagatgtcactgagccttgtgtttgccattcatgggctgatatggagaactattatttcctggtatttcagcccacagctgtgaactttccttgtgataatgaaccaaagtgtaaatttcgaaaggtctctctctctctctccttttagatctatgatttaaaaataaggataaaagacaggagaggagagagtgttggagagggaaaagagagaagggaaggacaaaagacagagacagagacagagaaagcaggactgagaaaaggagaaatggtacaggagtggggggggggggagccagcatgaaattttatgactgtgaacttataggtacagagaacttgcaatttcttcattctcagtatttctgttgaacttgaacatgtaaaatattgccagtcagaaaggcctcacgctagactagagcaaatgtaaaaagtgttctttgcctgagggattgtcattgttaggcagaaggagacggtgtctttttgttaacgtcctatcctagactgccattaggtgtcattgtcaaaccaggttctgtgaaatacaggaactagggaattgttttctatctatctatctatctatctatctatctatggaattgttttctatctatctatctatccatccatccagtagatatttttgttattacatgactagtgtatttaacataagccgtattcaagtttttgctgttcaggaacaattttagaaatatgtgtggtgaggtagcccagtcctggatgtcagccaagctacttgggataccacatcaggggagctgcaagttccaggctagtctggggaacagaggaaggactaacttacataaataaagcaatttagaagagcaatgtatgtagttcaggggtaaagtggttacttgatatgtgaaatgtcctggatttgagcccagcactgaaggaagaaaaattggtgagctgagcactgtagaataatctcagcactcaggaagctgagccaatagaattggctacatatacctataatggtgtgatgtgtaatgtatttttttacacagtgtacatatttgcgagccatctctccaacccctgtacatattatatagcattacttactataataatacattatactatgtacataatgttgtggcaggtgagcatagagttcctttaagatatgtttatcgtcttccactctttctgtttctagatctatttatagcatatttggaaccaggtcttttccttctgtggtggtcactttaacaggtttctttttactcccactccccagtggaaaagctgaagacccagtgggagagtactcagcatggtgtggagctgcggcggcagcagctggaggacatggttgtggacagcctgcagtgggacgaccacagggaagagactgaagagctcatgagaaaatacgaggctcgcttctacatgctgcagcaggcccgccgggacccacttagcaaacaagtttctgataatcaagtaaggcaaattggctagttttttgatgcagtcatttgatagatttacttgttttatattgataactataattaggggctctcacgttttcccaagttcttagacatacatgttgagatttatgggaatttaatcacagggttcttgttattttgggaagatgtctaaagacacaatgagcaggaacgtgcacttgtgtgagtagagccatagttagcgtctacaaggcaatcctcatttgttgaccctttttctgtctagggagattcttttcttttttttttttttttttggtgtttttgagacagggtttctctgtgtagtcctggctgtcctggaactcactttgtcgaccaggttggcctcgaactcagaaatccgcctgcctctgcctcccgagtgctgggattaaaggcgtgcgccaccacgcccggctgagattattttaatgtataaaatttttctagacttccatttgagtacttctgtagtgtgcaagctaagtcgtacctcagtgtcattctctattctatgtttatcagtagcaacagctttcatgaccaatttcataatagtggtgagaatattgaacactcagtgtttaaagtgtgttatttaaaaattacttctgtagtcacagaaattttcttgtgctggacatgtggttacatactttgtatttgcccttgtgattgcctgagatgaaaatgtacttttaggaagaatgtagtaatctagaacaatgtgggaagaaaactgagaacctgcaaataatgccttaaatctctgcacacgagggcttctcgtggctatcatctcatgggtatcatttaaaatccacctggccacgtctgttagttcctgaattgtcccatgtgtttatgacgcttgtcgatggccccgaagtaagagtgaagcttttgtacacatgactagaaaaacctgatcagcaatgttcaccagtgcttccatcttcatacccagaatgcacttggccttcccatctgtagcatccatgtctacagattttaaaatgaacacatggattttctgttagcttgccattatcccgtgaccacacagtaggacaactaattatgagtattgatgtcattttaagccagttcttcccagccttcctcgtgctgtgatcctttagcccagctccttatgttatggtgacccccaacaatttaattattgttcttgctacttcataactgaaactttgctactgttatgaacagtaatgtaaatacccgatatacaggatatttgatatgtgaccctggtgagaagatagtttgacttctgaggggtcgcgacccacaggttgagaaccactgttttaagcactgcaagtaacccacaggagacttaaagtgcactggagggcgtgcacgtcttattgtgcaaacactatgccattttctctaggggatgtgtgtgaatttggtatctgtggaatggaaaggtttgggagcagtctttcacaagtactagacacagattctctgctgctctaatgaacagtgtgtatgttctttctgaagccttaaggtggatttttctttcacaattgctacaaaaacattacagatacaagtgacacaagtgtccttcttgattgacacacacacacacacacacacacacacacacacacacaccccgcttaacctccctgggttgagaacctgtgaaggggattgtgcctgtgatacactgagcatctgtgtagatagaatgctgaacaaatcttcattggctgcctgatccattccagctgttatctttgcaaacactcagactgattcggagttaaagggcagagggtttccaccagggtaatcttccgacgtgtctctaaatgtatacacaagaactcagtttatgttgatatgattcatgttctgtgagaattagctacacagcaaaaagaatgacaagggcattccaggaatacgagggtttgaggaggccagaaatctcaatgggtaatattttactctcacctactaggcacctgattcctcaggcatgttctcttttaaacaagtatttttattatattttaaagcatgtgtatatgtgtgtcatgcaagagtgcaggtggctatagaggtcagaagagggtgtccacctcccgaaactgcctgggacttcagactaccatggtggaaaagctctctttttgctatttctagaattactctggtttgattgttctgatttaaacttgagagtttgtcctcttgcttccttcttatgatttctgtgtctaaaatgtgctaaatcttttcaggactatgagagttgggtagtcctagttactgagtagccatgggtaggtagttttagttattgagtggccatgggtaggtagtagtagttattgagtgaccatgggtgggtagtactagttattgagtaaccaggggtggtagtaatagttactgagtgaccagttctaactgtgtttcaatttacaccttagctattgcttcaagagctggggtctggcgatggtgtcatcatggcgtttgataatgtcctgcagaaacttctggaagaatacagtggcgatgacacaaggaatgtggaagaaaccacggagtacttgaaaacatcatgggtcaatctcaaacaaaggtaagcctgggtggggacatgtgcatctccttcccgagcatccaatttccttcgctttcccatggaaacaagctaaataggcaaatattagaagtgtatcttattatttttctctacttttaaattctgatgaaaaaattcatgtcagtatattttgtgcagagtgtgtatttttatatcttcttgaagttttaacactgtatttttaaaaataaaccttgctagtattattttaagttttcttatttttttccctatgcctctttgtattatttagaatacattttgtagttctctgagagcacagatagttgtaactacatcaggctaatattagtactaattgttactgtgatagcgtatgatatttgggtgggatactctcaaatgaggaccagacactgtggatctaccacctgacctcagaaatcatctatgtgccgagttttggctaattcattatcttttctttccatcattgtcttatcattatgtatggaaaaacctggaacaacatatgtgtttcagagagggtttcactcacttaatcttgcagggatcgagaaagcatgggcagcagttagcatttttccagattccatgtatgtccatcatcagttaaaatatttatatagcttactgttagtgcccatatgtaagtgaaattatggcttcttttttatgctaagtgcaatttcttgaaaattattttaataccaaaacatatttattttgtaatggataaaattgctaccagaacattttatgttaaaataactccaaaaatttaatggtaacttaacacagaggaatttttgcgtatagatgtgttttaaattgtgtgtgtgcctgtgtgtgtgtgggtgtgtgtgcatgtgaacatgtgtacgtgtatacatctgcacatgaacatgcgtgtgctcatgcatgagtgtatccatgggtgctattgcactcatatagagaccaaagaatctcttgtcgaagggagttggttctttttgtctacagggtgcgaggcttgtgagaatgcacctttatgcagcacaccactaggttggacctctggagagccttgtgagttagattctttaacaaggttctggaactccttgaaggatgagaatgtttacgtgttagatgcttactcaggttctccatagaccctaacaaatacacagctttgccaaaagttaaaggtaaatagctgcaatcttggcagtttcagcagaatagcgttcttgtatcatgccatgttgtttgtgtagatctcataactaagatagggagggaaatgcattaaaaaccacagagatatatcttaaaactgcttcatccatttccagaaattacatgtgtaagaaacatggctttggttttttttttttgtaagcaattccaaaaagttgagcactcgctggaatgaacagtctgctttttcttagcaacattgaggcttttctttgtaaatactctaagacagtccatggctgcagttaagttagacggacgaggcaattaaagacaaattatatcccaaggagatctctcatttatcagcgttgaggtagccacagagccccagttttgtcgtagtgaaaacacgtgcttcactttattctgtttctgagttgttttagtaatgagaattcctattaatattcagacatgatttaggtcatattgttctttatgcggttaggaaaatacaacaaaaccttggctcacagaatccttcctgagtgacagccacagcttctatattgaaactgtgtgtctttcaaatctttaactatcctaaatagacatctcttgggaatatataaaccattccttcctttcttaagcaaggtgtgagattatattaaccttcttttgtgtttttgacattgttcttataaagacagactttagaccaatacttctccactttttaaattatcttccacaggaagcttttaaaactccttccactgaaattttaattaattagtaaatgaattattctgggggcacagcagagtcttactaatgtagctgaacttgcaaagtagctcagagtgggattaaacttgggatcttcctgtataatctttgaagctttattaataatggagtattctgtgagtctgtttccattctatgcacttaagctttttagttagacagaaaaaggagtgagtttttctaccaccactctgggggtagatctactaagcaactcctttgagaccacttgggctagcctaacactgtcaagcttagtgacatagaaagcaaacgacaatttcttaagaccaaaagccggtaacactatccatgctctgaattctgaaacatggaagacaaacttaatcagctgctgtctcctgtgagtgtctgctgtggttttccagtgtggatctgagtgacttctcactgtttctaactgtggtaggcacttgacacagctctcctgtagttcgcccacagccttaagagacaggacgcatcttcctcagcattgcattggttgtaaatggaagctcagaggcagcagagagttccccagagtcacacagctcatcaagcatagctggaatttggatttttgcctttttgcctacacagccaggctcttacttcctttaccaagagtttaatttttcttctttgttatcagaatgtcagctattgctggtgaatgctcgctgtgtgctcttgcttctcagatctgcggttctatttactggtgcttctctgtactgtgtatggagaacagatcagattaaagatacgggagcttccgtgaataatagaatagagcaagctctagcacatggccactgtgccaactctgatggcccccgccaggcctttatcatcacttcctcttacttcacatcatctctgaatatactctgaatatacatcattgtcagcagaattgtgcacaggtgaaggggtatcacacttgcatacacagtaatgttgttagtggctgtgattcataaagtttaatatgagctttcaggggagatgtttggtatgaattgaaattgaccattcatagttaaaggtcctcattcccttatctacagtgtataagccccaagcagccctgataacagacagctgccctttaatgtgagtgccttaattatagtctttatgcagtgggaatgacttcctcctagcagcacgagtattagtctgcttgattgcttccctaaaccttctggaagatgatctgtaatatagagaaatgtatagaaattcttagatctttgctttccttttttaatgccagttagataattacttactgcaaattttgatagtcaagatatgtgtgcacaagttgaatattctttatctgaaatgcttgggacaagaagtggtttggacttgcagatatttacaggcacatgatgaaagatatagaagatgatgctcaaatctaaacatgaaatttattctgttttcaacatactgtgtaagttgggaaattgtagcatgtgtgaagccttgtaccatgccagcactgtaattaattaactaataaaaagtcatgtatattttaaacatataaccagaaggcaatttatataacatgtttagtaaatgaaacagaaatttccaccgcagcatcatgtcagtactgaaatcaattttagatttcagagcatttcaggtgtcagggttagtaatactcaatttatagcaagttttggagcgtggatgcctgatttggatgtgaatggttgtttagtcctttatttttgctctatatagataaaataacactatatatatatatgtatatatatacacatacacatatacatatacatacatatataaataatgtatgcctgtctatgagtatggatgtatatatgtatgtgtatgtatagaaatagaatgatctgttctgaaggattataaaggaaatcagatcccatgactatatgctatggtttctcacaagtcactaattaactatggactttctcttgtcctatcaccacacatgcctattataaggaaggcacttccaggatggtagaggtagagcaagtccagtgtgaaccttgagcaagttatttcatctcgctgggtctcagcttttcctttaaagcggagggcatggctgatgggtaggcctactgtgagatcaaaagtcatatataaacgttcttggttcctggtctgtgctccacaaaagtgcacccaaattaacatcatcgctgtcatgtcttccacgggactgatatgcagacttgtttgtcattctgaatggtttctactgatcctgatggtaaagtgttggattatctgctttaatgaatgcattagagttgcactcagtctttattagtagatgaaacttcttttaaaaaaatccaattatcttacttagtgaaatcaccacacttgcttaatccatgttgtattcaagtgtcttgtgctaaagcacagatctagccatcctggcaagaaaagaatataaaacttaaaggactatggtttgattgagtgccatgcaaacgattcaaactgatgagtgaaataactttattttctttttatataagactgtctttattcattggtactcatggactgggtatatttacatggactgacagaagttttgtgtccactgatgactgagcctgaggactgggcgtatagctccattgtagatggcttgtcttgaggttcaattctcaaatcctgcataaacagggtatagtaacaattgcctgtaatctcagcactcaagagatgtgggcagtgggatcaggagttcaaggacatcctccgtggcaccaggagtttggggcagcctgggacctaggagactctgaaataaatggactgaatttggtagttcctggaccgtagtagttttcacagtgaattttgtcgcgtgtctccaagcttccgttttgttttcctttctctgtcgtgtttgcttattgtctctgtagattaagcaaaaagcgtatattcttcagcatgggccccttttcaataccttttcaatacaaaaaggtattggctcaaaaccttttaagagtggccaatgaaagacatcatatcaggattaccgcttttgcctaccctttggccaggctcaaccactgagctcataaaattagcgactgtcatgctcagtcaatggactttgatgggaagtgcagttagctttttccttcttgctgatttactattatgagagccagaggtttgcatcagtcagctggactttcctcttggaaggcaatttctttcctcaatagtcacctttggttttcagtctgtttcttttgtttacgctgttcacattgagagaagtataaaagttatactcttctacattgttctgttctgctatttaatagtccatgtattgtttttctgcccttaataaagcacagccatcatgacatactatttgtatggtgtatggagagaagattcctgtgttcagtttgtgccaggcccctacatgcagacatttttctcagttttgcatcaaataatatagagggttagtgggcacagtctttgtcttttctttcatttgttttgtttttattccatcagtgaattaatcatttaattaatgaactattcactagtctccatctgtccaggccccaagagagtacagaagaaccaaccataaacatacgtgttccttccaccagaaagctcacattctattaagagaaatagtagaatgcaaacatggtatggaagaagttgggataaagattaacataattgtaggcggttgtttggaacttgtaaatgaagttggcagtgtaatgtaagaacgggactttaaaatggtagaaagcaaaacccagtggtcagatgtgaactttatgaagcacaggcgtctcggcatgagcgcgatgggaggctagtgcgtgataagtctgggagcgacactgcgttggttccaacttaatctctgtacatcatgctttgagagttgttcactgggctaaaaagaacagttgggaagagcagaaaggacacaattgcttttgaaatgaagacattgttggctattgtgatgcagccatggatactgtagtcttcggatctgccttggatgttggcatgctttggtggtttagctgtatggtgtgatagggtggaaatattaaaagatagaatcttatgaaagacactgaactgagagacactgtagctttgtggggaaaaacaatctagaggcgagaaagtgcagacgatttatagaaataatttcagagaactttgctgtgaggaggggacagccagattagacaggaatgggggtggggtgggggtggaaattgaaaacatagtacttttgggcttaagaattccagtttcagtgaagcccagatgaggccttggcctgaggagactaaggtccaagtctggctgattgtatagcaggagctctgggacttggttgaagatgcctttggaacgtggaccggtgcatgtcgggaagggtatggaatgataaaatattgattgataaagtgaagagcaaatgtgagtagtgatctagtttaaataaataattaaaaaagatctagcgagaacgcagcctcttatggaaatgtctgggtggtctgttgttgtttttttaactggcaatggcagccccacagggaagtaggtgctctgctgtgttctacacaaccttgcatcatgagctggggccagagctctcctctttaacttttaagtgctctggcatcagtgccttagcacacagaccccttaagacctgtggggtgaatttttaagtggcttgggaaaggcgcaatctctatgtagcaaggactgctacagttccccaggcctctctgtgcacactgaaaggctttccccacagtatgtgttggtatctatttcagatgaacaaaatcttaggaaattacttccctgtaagtttcctaccttctacttagactgattctgccattttccatgctgaaagagataaatacatttaaatcttctgcagagatcaccgttaaagacgtcaaaattagcaacacacaactgtggctttcctaagaactcgttttgcatcttgtaaaaaaatttggggacaatgttctctttgaccaattataagcatacacatacttcatagaacagtatattacattctgtagcctaaaataccaaatattgcctaacatctttaaaattgcgttttcaaaagcctgctttgtaggtggctatattttatgttacaaaatggctatcggtttgttttatagactatcacagtgagttttattacagacatcatgtgaaagctaagacttcatattttagaaaatcctggttccctttaatataaacgatcacaaatctgtcacccgtggatggccttacatttcctatgtgaagctatttctattttctttgtgtcctatagttggttatttcttttgtttgaggcataaaaatattttagctaaagtaccctgtgtagacttcaaatgttatatcttacatgttttcagcctattcttgctttttttgattttataggtttaaagatttagatttttaaaaagtccctgcttttgtcttctgaactcagatttcctaaagttaaaacttttattcccattataataggatcctttccatacatacggtcatctttgtccttttgcttcttctactccatcctggtcttatttgagacccagcaaatcaagcattgggtgaagacctgagctggacctacagaaccatgtttgtaataaatgaaaagctccaaacatgatagtgtgctctggtagtcccagggctgtggggacagagataggtagatccttggggctcagtcaccagccaatgtagcctatgtggcctgccagactgtgttagtaaaagcagaaggtatctcaggagttacatcagtttgcccttggctgttacacacaaatgcgcatgtgcacacacatatgcaccctgagactctagatgaatgtgggttcagtactaggcatggccacaggagccctaggatcagtgcctctcaacctctttgctccagtaacatttcatgtacaagtagagacacttagtgaagtgggatttcaagctaggatgggaacaacagtggaagaactcttccagctgtgcctatgatatcagcaatggcttacacagtttgaaaaggacccctagagagtctgaaatggctcttccactgatctgctccaagctcttcattctaaggcgagaactgatatatcaaagacttttacatggttcactcgaagccatgttcctgggaaattgcagaagaggcaaaaataggttcttttcttctgaaggtagcatacagggctattaaaaataatttattaacctgcttgattgaatatttgtatatgtgtgtgtgtatatatatatatacatattatctatctatctatctatctatctatctatctatctatctatctatctatctatctatccacacacacacgtgtgtgtgtgtgtgtgtgtgtgtgtgtgtgtgtgaataaaattcagtataccacactagatttggatctaattttagaaacaaaaaatcagctgagctgcactctgttagaaacttcatataaattatattaacgtcagaaatcagaacacaaagtgacatatatgtgtgggctatgataactctttgtgtgtgtgtgtgtgtgtgtgtgtgtgtagttctagaaattaggtttgtgcatgtggtaggcaagcattctactactgagtcatatacagacatacatatgtcctccactataattcattatgacatatgtatcatttagacttctataaacagagtctaaacttcaatattcctttttataattagaaggtgtattgtgtatgtatggtatatgcctttgtgtgtatccttgcacgttcatgtgcaggccagaggagagtaccagaagtctccctgtattgctctctgtcttgtttcctcgagacagggactttcactgatcctttgattcttttactttatcggaagttagtatttacctctgtggtttttttttttttaatgcataagtttcttcgttcctattgctaattcctctcacatcttttcagtagcctggcagtgtaatttttcacaaagtctgccacgttagggaagctgtcacttctgctatctttatcttgaaggcatctctcctggtgccatgcattctgtgtgtaccttcactcaccatactgagtatgtctattcttcttctctcaatgtgtcatctcttcttggatcttatggttttgttctcccttttggagacatttcatttgagtatatcttttgtaagttttgtcgagttaatacagagaccacagagcagtcaaagtgacaacacactcttctctctttgatcccctttgtcaccaccaaatagcctcctgatggttcctgttgtcaggagtcttgtttctttggttctggaattttaccccttcatggtgtatatagtttgatgtagtctatctccaggttctttagggaaaaatggcatttaggaacaaatctcaaaggccagatatccatctggtgaacatcatagttctgcagtatggactctgaggaatgtggaaatatggaaaacaattgctgcctgtaggttgtagaataagtggacagattaaaaagtctatatattataaagtgtagagtggaagcagatcagaatctaaggacctttctagaatacacatgattattttttatatagagcagctcactgtccttttataaacccagagtgaggaaacttgagaaagaatagtctcaaagagatgggttctaaactttaaaagataagtttgatcttgttaagtagagatagtaggaaggacactataatgtaggtataaagtttttacacagtcatactatcaataacattctagaaaatctgaaacattacttggacatgaagagaatatgagagaaaagtagaggttaaagttggggagagaaattggcaaaaagttttagaggacggaacattccgagtagggcagtgtctctgttagggttctattgttgggaagagacaccatgaccatgccaactcttttaaaggaaagcagttaattggagctagtttccagataatggagtttagttcattatcctggcaggaagcatggtggcttgcagacagacatggtgctggaaatggagctaagagttctacatcttttttttttttctttattaggtattttcttaatttacattttccaatgctatctcaaaagttgcccataacctcccccgtcacttccctaccctcccactcccacttcttggccctggcattcccctgtactgaggcatataaagtttgcaagaccaaggggcctctcttcccaatgatggccaactaggtcatcttctgctacacatgcagctagagacatgagctctgggggtactggttagttcatattgttgttcctcctatagggttgcatatccctttagctccttggatactttctctagctcctccattggggtccctgtaatccatccaatagctgactgtgagcatccacttctgtgtttgctaggccctggcttagcctcacaagagacagctatatcagggtcctttcagcaaaatcttgctagtgtatgcaatggtgttgatctgtgggcaacaagagaaagaccatgtcaccctgaccatacttgagcttagaagaccgcaaagcctacttccatattggcacacttcctccaacagggccacaccttttaatagtgccactcgctgtgggccaagcattcccacacattagtctttggaagccattcctattcaaactactacaggcagttcgggtttattttctagacaaatgggactagaggaattttatagagtagctgctgctatgattatgtcatctcggaaggtcacattaattgattcactgttgtcctttgtatctggcttctttcacttagaagcatgaatttgagagcccgatcatatcattgagtgtagtttgtctcagtttctgagtcctatcccattgcttgcatggagtgcgctttactctccacctcctgtttgggttgtttatggtcctggaggataagtcatctgctttccctgtcttgagtttagttgctttagagatttcccccaaatggaatctcacagtatgtgtcctttggaacttggactccttctcttagcctatttttgtggtgtgggcatgttaagttagagtgtttatcaggatggttttattcattctgtggttgagtaattgttcatgtattagcatataatggtccattggttagtgcttccttcagataatgtacagtggtgtttcagtattctgaatcatgaagctctaaacatttgtgtatgacactttgaatgggcgggcagttccagtgttcttgggtctagatagataggactaaaaatatgtgagtgcctttttttcaaattaagatttatttatttggtatctgtgagtgtatatgtgtgtgcatgccccttcctgcctttatagaagccagaataggaattgtatcattgtgccctttggagctggaattacaagagtctttggaccactgagcttgttactttctgagacccaaacttcatcctggtgatggtacatcacacactctgggtcacaggtccatccatctatctagcctagtatccatttaataaaaatagtttgtctattttctcactgtgaaacttggaggtatatacagctataaatgttggatttacaggtatataccttgcctaattcagataactctcggtgctctagttttgatgtagaacttatgaaacattcataaaagcttgtttgttcagtgtctttcagatactattaaatattaagttgatattactaaatattaattattaagtcaagtattattaaatcacattatatttacttagattattagcaaaagccaaaagttattatttcctttgtggtgttgggggttgggcccagggccttgtaaatactaggcaagtgcttcaacactgagctctccatgttagcctgtgtattgtttgtttttaagtcttaaatatttattttgaatttgctcttttaaattcagtgagtgaagtatgactatgtattaatatcacctttgattgacatcccttttatggcagttcatagatttttggcataaatctataagagatcatgttaatgcacaaatctgatatgtaaaatacaggcatgatttattttatgttgtgggtgtggctttgttaatatttctctgtctctgtactggtatctcacaagtcactagacatcctctttaaggattattttagacacacagatgaaaaaaatcacacatttccgtttgatggcttaaaggatggaggttcctctgaggctgtgtgttaattttgtcttgggtgcgtatgatgtatgacatcaccctgaaagtcacagagctgtgtcttctatgttgtttcttttagcatcgctgatagacagagtgccttggaggctgagctacagacagtgcagacttctcgtagagacctggagaactttgtcaagtggcttcaggaagcagaaaccacagcaaatgtgctggccgatgcctctcagcgggagaatgctcttcaggacagtgtcctggcccggcagctccgacagcagatgctggtaagtgtgtgggaagccacaggcagcagtctctcctgagcccctgggccaccagggaactgattactgtttcaaagtgaggaggctgtctgcactttgagttatggaatccgtgctgtcccatgaataactagtttttttttggatatgatctacagaatacttaatatacttaacattaggctgaagaccaccttgttttatagaaataattgtgtatttagagctagagactcagggctgcttggttttctgccattttaagcccttgtgccattagtgctattgaatattaaattataaggtcatttcaccttcatatgaatgggaaattataatttgtattattatatttattataatatatatttattatttataacaataacttgtatttatactacacttaatataaatacttgctgtagaaatttcaaatctttgtgattcagttatagccagatctatgaggctcaaagacattatttatgtatttactttataatcatgactacatatgcagtctgaggttcaaatctcattcttgagaaatgtggtaatattaaagcttttctttaaataactttgtgtgaaattatatgaagcatgccagaatctctctttccattccaagtcatagcccttctgtgctcctgcgtctttttctcttatcgtgggtaaatgcagtgatcatttcttgtcaattttagataagccttctcaattacaacttttaaaaagttgcttcatcaggggcatctcctgtgtgccacagcgacacatcacattttgtctgtatgctgtgacttatttacaaacatgtgaattcatcactttgactactgtcttctgccattgtggtgaacatgcgttttgttatcattgagtgtatgtattttacctaccttagttgctcacatagttctttaagcatagggatgctattcttgttgtttacatgatgtttcaggatcaagtcccaagtaaatgcacttgattctaacttctgcagttgaaatttagtactgttaaccaatttttaatccattcttaagaatgcttttctcttgaaatatctaaaagaccatattataaaatatcagcaaattggattaaaggtctagaggcttttttggaactattactcttaaattttctaagttaaaaataattattattaatgtgttaaaaggagtgttgttgctgtaccttctacaagagaacacacacacacacacgtgcatgtgcacaaacacatgcatacacacttgtacacacatgtgcacacactggcacacatgcatgcaaacatgcccacacacttatacatgtgtatgcacatgtgcacactcacagaaaatttaaaaaacttttaaaacaagtttgtttaatttggaataggcttatttataatccatccttatgtgtgaagactcttacagtctcatagtgaaattaaggagagttagggcctgggaagagtggcttagtaggcaatgtttttgccacagaagcataaagacctgagtttgaattctttgtactgtcaaaggtttagtgtgggggttgcctgatgattttgctgtgggtcttctatctcaagctgtgggtaggagggtggagacaggcaatttcagggtctcaatggccaggcagtcttccctaaactgtgtgtgagctccaggttgactgagaaatcaggtctaaaacaatggagaggagagtgattgaggaagacatctgaggtcagccttcacagtccaagggcacccacatatacacacgtgcacatatggaccccagccaacacaaagaaatggtagaaaagaaagaaaaacaaataccagagaaaatgtctgttggcttgctcatttcttatgcattgcacactgttcttgtgacttggtgatgagtgtgtccaggcaagtatcaaagttaaaggtgctctttcccgtcactctctcgaccctcagaatgactgttaatgtgaattgctaaaatatttcgagaaagtcctcatttcaggaggctgcagtgggcattcagtgtgtgtaaacgctaaaccatattagttttgtgatttaaacaactataaatttgatctacacatgcttgcagatatttaatttatagtggtgttaatttcaatgctgtttagactgtgccccccagtaagcagtaacttgtgggaaggaaggaaggttccacatgaaccctgctaatatctggcctgagcagcacacaggcccattggagagtctagtggtgttttctcacacattttctcttaggatatattcttaccagagctccagctcctctccatttttaatgaatattcaagctatgggaaaaataaatttaaatagaaatggtgggaatcttttaaataaaaataactaagctggggattacttgtcttatggcaaacattgacagcccaaggaggctgttggctaatggatggagagaaaatgtgtacggtaattgcttctcaaaaataatctgatgttgctaacatagtctgtttgggctcatacgaaggcaggcctttgctaacagctgagtcagatatctgtttatctgaagacaaacgtggaatgtgtccaggatgcctcacagtatggtgatctctgtggcttccaccttctgctcttctagattggatactcttagtttatagccctcccattgtttgactaaaacaaaaaaattaatccaatgactttgtttctggcactgtatagatagatggttgttagatatgtagtggcactggctgagcatttctgagataaaggaatttaaattttcccatgggtttgtagtttatttctcgtttgtgtgcatgatttcaaatggaaacgtgttcagaaatggaaaggtatgtgaggaaatcagaaaagacctgaaatcatgaaataaatttactggtgttgagctgctgctggtggtggtgagccagccatctgagatttctgtgtaaggtgtggtgtttacttcattgtactcttgttgcatgatcaggagatggatggatctattctgatagccattatctatctatttatctatctatttatccatctgtcatctatctatctattcatccatctgtcatctatctatctatgcatccatctattatctatctatccatctatcacctatctatctatacatccatctatcatctatctatctatccatccatcatccatcaatgcatccatctattcattcatcaatgcatccattcatctatcatctatctatctatctatctatccgtccatctgtatctatttgtcctgagatgacatgttcactgtttgtatttgattagcattttgtgccaaccagatataaagccccacagaggtatttcatggagatacagtttataccgtgttcagtttaaagatgattctgaatatattttaataaagaagggcttggaagcacaatggtggttgaagcctttctggaccatttcttttatggacatttggtcatttggactcttgtatttatgttttggtttttcttctaggcagaggactttcagtaagagaaaatttgattttgatgacttgctggagagagatgctccttgagagctgaactgtacatggcagggtggtggtggtggtggtggtggtgtgtacctggcagtataatgtatatttaatctgctgctggtgggagatgtcataaaggggattaggccagagagtgaggtattatagcctccaagttacaggaatctagctgacgactctgtgaggaatggatttgtcctcagtgacagagacagtaagggtacctgctaggttcatttgtgctagatgtgatagtagctagaagtacagccctgcaggagttgaaggccttgggaggaggtgaacatgagatgtgtgtggtaatccaatgtagttggtatcataggagaagaaggtaacaggagagacttgtttggacttgaagggatggcacgttcttctattttgattaaagcagaataaagtgttaagagtagcctcccgtagaaggtgccaaatttggctcttttattttaagaagaaactgttgttgatttaaaaactcaatttattaattgacgcatttgtcttaattttcattgccacagtctagggcattcattattttaattacatttagttgtaagctctatttattgcagtatcaactactgagaagtgttagttcttttccggataagcttcggagtccctatggcctttgcggagtggatgtgagaatgtgctggatttgatccgaaagtctttgtctttcacagtcttccgcttgtcctgccctgtgcttgctgctagctacgtgttctacttctattgtaggagacagaagatcgttcagttctaccactgcacccaacttgtggggtgaacccccgtttcacttgctggctctggaacaggaattatacaagttaagcatccccaacttaaaaaaaaaaaaagcaaaaaccaaaaaaccaaaaagctgaaaccaagatactctaaactctgtaagttgttaaatgctaacatgatgtcctacatgttctataccgtgacagtttcttccatgcatagaatcactaataatgctataaaaaccatcctcagggttgtgcttaaggtctgtgtgaaacacaattgacttatctgtaggcttgggtcccacccctggaatacctcagtgtatttatgcaactattttattccatgatggggaaaaaaacaaaaactaaaaaaccaaaaaaccaaaaaaaaccaaaaccaaaacaaaaccaaaaaaaaaccccaaaaaacaaaaaacaaacaacaaacaaaaacaaccaaatcctgaagcttcaagcactcctgggctcaagcctttcatgtgaacgatgctcaacttgtaagttcatattttttatatctagtcatctatctgttatttacatactgccctgtctatgtacattctataattcagttttttgtacactcaaagatgtacagccatagctgcggtcgacatagaacaaacacgcaccccccagaagtccacttccctttaggatcagttcccgttctcaacccttcagaccctgaccttgttttatcactaactaatctgtattcctatctaactaagaacaagcactttccattatgttaatggaatgtctctggctttggcagcctcaccaggaggaggcagtataggttctcaataaggagctgatggcaaattatacatacacaggctgaagtttgatgaaccagctctatttgacccaatctaagaccttaaatcacacgagtgtgaaggactgaggagacagaggaagcaaaaagaagttcctgaaaatgtcattttcctgaccatagcatcacagagaggtgaatgagcagtgttccctgggcaattaggataggccggaccttgataatgagaaacatatgggcttagtttcaggctgtgcccttttgcccagccacttaatcatcctgggatactctggtcctctaagatattgtgcccaaattggttatcatagtgcaaaacgtctctcagacatgtatgtatacatgcacataatacacacacacacacacacacacacacacacacacacacacacacacacacccttcatatgatgtacaattgttctcttggatttcctatatgtgaaattaaaacagcttcaggacaaacagaaagattacgaagatgctgtctaagagggagatggagggtgatgctctacagtcatttgcaggcttcttgttattaacttggctgtttacttaaggggtcctatttgatttctggcctgatttgctcctgtgcagggacctggaagcctatcttttggctctgcctttggagccgaggtaaaccttcatccctccgtaaatatgttcagttttgttttggatgatgcaatgcccagactggcttaaggtgatttattagcacagagtgggcttcagtctgtccttccagacaaatcccttagtgctcctcagtgtttctactcattccacaagcacagcgggagccgcgttccactgggagtgctcgcatctctctgtaaagcctcatgttccctgccacccggtctcctcatgtaaactcagctaccaggcatgcaccgtggccgtgatggggttcactctctgtccccaggggaagtcgcctttgtatctttagctttagtgcttcacttaatatcctctcgtctccggagcgctctccttccctgcagccagcagtgcttggccacgctgcaacttgcttcatttctggccacgccaggctgagcaggtcctggctgtgagcatctgctgggggctgtctgggtggcgttcttcagtgtttttgtcaaatcaagaagttgatggactcccagcctccttttctctagaaccttaaacccccctttatctttcaaatgcatgtctggaaacgagcatgctcagagaactggcaaatcattgtccagtgaccgggaggaaatgatcgctgctcttcatttataatgcaaattctgaggactcttcagaagtgtggtaaacttaaaatgatggcggtggtgagaacgtctctgcagaaagttgtggttttgttacatcgtttacaaaggatggcagtttcctctccgcggtaccagaagctctgcaaggtaactgattggaaatagggagtgggtgtctgaagaatccactgttgcctggctaggaaatactcatctttcaggctcctctgaaggaaaggaaaaactccctttccaggcaactgattgcaaaagctgttaaaagaaatcgctccattaaaatttatttaagcctatgagacaagtactattttagtacatattttattttaccatctataacctagtcttctgagatgggttgtttggagaaaatatgacaaactattttcattaagacctgttacctctggggtactttacaatatcttaatatttaatgacacattaatacaatgttaagctccagcaaaatcaagcagagagctcagaatgctctttcaacagattgcttaccgtgctcttctttttatagctgatattttccaattaagaaaagtaatgcccattttaaaaacaagcttagccccattgtaaacatttcttatattcttgtgtgtccacatgtcctagttaaagttgaagaacacaattttctgtggccaggtgggttaagtagtgttttaggatataacttgtttgacagttatacattttgaatgcaatgtcagttattctaaacacaagccgtcccacgtcctcctgtgttgttttgggttagtatttgttattgcccatggtcttatcttatttagtgttcgtactgtctccttatttttataaaaacaagatgatatgatgcaaaaggaagattatagcagcagcaaatcaaattttatgttattacaattttctccctgtacaattcttagtatgcttctaaagaaggaatcttactgttctttaaaagatcaactgatcagtaattgggaaaactgcctcttatctcattatttttctgaagatgttaaatttgatgtgttgaagcacctaggctctgcctataaagcaatgggtctaggctgggaagctggattctgttaatttgatttttttttttaatcacagtgttgtgctttacagtttgtctaatttaatatatgtctgtccagaaacttactttttaaaatataatcttaggaaatcgattgatatagtgagacgtgctttaaagagatgctatattttcatttgtgttaagttaattaaagcttgatccaacttattaatccagtcggaaaagtacagaactaactgttggatatgttgagatttcatctgcttaaagaatccgtgtgtttttgtaagatgtttacattttcacaaaaagccaattttgataatggagaagaaaaatgcattcactaaataagtattagtattttactttttaagtattggtatagatacatgaatcattaatatatgttacttttttaaagctaaggatataaatgtatgaagcattaaaaaaaagctgggttattatttttctcatctattcccataagcactttcacaaaagcagaggggttttgagctgtaaggccattgggtgcgttgacttccacacataaagcaaagttaaggtgctggagaaagctactaagtagtcttatgataagaccctgaataagcacacatcatgttactggagtcatggggaagttcacttccaacaggagtattctttgggaagatttattgagatttgtaatttctcaaagatgccttagaatttaaatcttcggcacgggcattactttttgggaacctgaggttgtcttatttgcaattgaaatttaccctttatatattctctaccctatgtgaaattagctactgctcagacagggagggggggggcacacacttccagtactttccagtaggtgtcagtgtcaggcagtgatatatgaggtttggggactccagacagggaagtggcgtgatgctgttgttgactatgaataaatgaactggtagcaggtatcttttatttatcttattgtatgtgggaaatggatcctaatgcatatcattgtggataaaattataggtacagacttaaatgtcagttgtccttctctgttaatggcatggtatctatatctactgagcctacttgttaccagtgctgtcactgtgctgcaagtttgaccagctgtactgtttatctgcttagcgagacactgaattctctttatttaaattgcaaatgttgttacagctatttccccctatatcccttacattctctaaatttagtcttttagaaaggaaatgttaaatacttcagtgttttgccataaaaaatacagaaagtctatatttcaagtacatttaaagacgagagagagagagagagaaagagagagagagagagagagagagagagagagagagaagagaagagtctattttgcgttcatcttggcattttgaaaactggtgtctgaatatttgtaccctcttcatctttcacatctttcttttgtctgttgtatgggtatcagtcatttataagtaagtgaaaaacgactggaaaattgtgcacagtattcttattttgagttttatttatttgtatgtatttccccctgcctatttctcatagggaaagggacagggatgggcagaacttggggaaactgtggctctgagtaacccccctccaactgtacatggtgttgtattttttgcttttaaaggtgtttctttctggttatacaatccctaaaatttgggcaggaaacagaaacacattggctgctgacttgagaagcagcagcattgaaattgccctgatgacctcgagccaccccacgctagatgctaatttctcctgatttggcttagatcacttagcttctttaaaatattaatgactctagaggataatttttcctctattagagcacagtggacacaaagctggatgtaagtgacttttaagattgctactgactttaacttgtttgcattttgtgattatcttggcctgttttcagtctttgaattgaaacctgattgaggttatgttgagttagagaggaattttataatcccacccccacccccaccccctcagggacatttttaatggcatatttaataattgacgtggtaaaaagtagattcttacaaggtagattagtgggtgagtcatagaacattgaaaaataattagtattataaattgagtccttcatgacttcagcatttttattgatttagctaattattttgatttagttttatgatttttttgtgctgccagcatatgtatgtaaaacagtttcgctgaaataattttgtgcccaaacattttgtcatgtgtcctatgagttaaaatattttaagcatcctggtgtatattattaattcaaggttgtgcacaggtgccatgaagaaggaaacagctgttcaagaatcatagagtgttgatttgttcgtgtggtcaatattgtcttcttactgcccagactgattcgccccttcattctgtgcatttttctcccaccattggcttattagtaggggacaatgacggcttggaaagccagggatgacaagtgatgtttaaacaaaatcagtttctcctccctgacgtctgtatatatgtttgtgtgtgagaaccacatagaccctgtgtgggtacttttataaagggtaactctataactgaacatatcccaatcactcagtgtttgacatgacttttaagttcacatgctgcctggcatctgtatgttaatatgaggttcatataaggtcaagcatatgtgctggacagtggtggcacatgcctttaatcctagcacttggaaggcagagacaggctgatttctgagttcgaggccagcttggtctacagagtgagttccaggacagccaggactacatgaagaaaccctgtctcgaaaaaacaaaaaaataaaccaaaacaaaacaaaaaaggttgaacatatgtgttttgggggaaaaaaatagaacacgtgagtggtgcattttaaaataagccttacaggttttactttcaggtggggtgtgttgctctccttggataactaaaccctgaagtgtttcagagcatgaaacaagcttgacttggccacagtctgaatgttaagacagaggtattttaagaccatctgtcaggctcccttggtttctctcagtaaccaaaccgtacacatatttcttgagccacagtaaatggacgtcctagcctgaggtccccttgatcatgagtcagttcttgctttcatgagaagccagtgggttgggtagttcagaaggtgtatggaggtggagatgccgtggagcaaaatggcggatgcggagggattcacatttattctcccctttccttggtgctgtttgtggtgtctcatcagagatgtgtgaactcccagaacgagtactttcttaatgctctgtcttctgcagttcctgctgaggtccagattactgactcaaaacaggagaccttcctccctgcctgtgactgtcacaggagttttgttttgtggcttcccaaaggggcagcagcttagctgatctgtgacctccctttttaccataattcctcatatcaacgcgaatgtcaaaattatcttttattacttaagtagtaacatatcgttaatcagaaaacccatgttaccaatgacttcacttatgatttaatgcagtgctttttacatgattaaaaaatagccgggcgtggtggtggcggacgcctttaatcccagcacttgggaggcagaggcaggcggatttctgagttcgaggccagcctggtctacagagtgagttccaggacagccaggaaaatacagagaaatcctgtctcgaaaaacacccccacccccaaatgccggtcacaaagttaagtggttctttaagaacaaaaaacgttagttggaactctgcgtgactgacgcggatacagtagggagtaaacagaaagttctttctgagaagagagctggcatagcactctagattcagaaaatgctattttgtcatcgtgactaaaagcttgatgacttgtgtttcctctggggtgcagtttattaagtatcaaatggaaatttccagcctgtatgtatggatctgaaagctataggcacgaaccgctttctcttggttctcggcagagccctgctggcctttcaaagggaagttagttgtttatatttagctctggaaattaagcaattagcagggataggagaatatagacaatgtcacaccattgtcgttttctcacttgctcgaagtttgttcatctcaggcaaggtaaatgagtccaagtaattgaagttggaaaggatgtggagtgtgggagaggattgcttttcatttttctttttctagtttgttcaggtctgtgaagttctgaaagactgatttgtaacaaagctcagtcacagaagcggacagtgctttttaatgcttaataaataattggccgctgtgacagcatggcctgataaagccggaacggaatccctctagaatggaaagtgaagtagttgggtcaggcctggtggtacaggttctgtactctcagctaactgggaagctgaggctggaagattgttccaggcctgggtggtttgtagagtgaactgaaggtcaggttgtataacttagtgactctctgtcttgtattgaaatgttaaagtatcaaagctttgtgtattgtgccaggtgaacatttgcctaacatatgtaaggccctaagggcaattccctgcagttgctggaaggtgttggttttcagggtgggtgcctccttctccctgctcttcctccttctcttctccctcttcttcctccttctcttcctcctcctcctaatacatatttgtgcatgtttattatagaattggtagacagtttctgtgtatagacaccatgaccttgacaactcttattaaaaaaacaaaacaagacaaaacatttaattgcgctggcttacagtatagaggttcagtcccttaccatcatggtgggaagcatggcagagtgcaggcagacatggagctgagggttctatatctggatcctcaaacagcagttggagactgtgtcacaccagccacatttgaccttatgctacctcaaagcctgccctcacagtgacacactttctccaacaaggccacacctcctccaaggaggccacagctcctaatactgtcacttcctatgggccaagcacttatatacatttgtgtatgggctccatacctgttcaacaccacattcacaaaagtgaccatctcttttgagacaggatcttttattggcctgacctcaccaagctgtccagactggggtggattctccctgtttagacttccctagctctgggattacaaagacagtgcacacacaccaccatacccaacaaacatttttctgtggtttctgagaatcaagctcaagtcaagcactttatccagtgagccaccttctcaggccatatttatggtgtctgtattttttcctactgtaaaaggactaggaaaacaaaaactgttgacatagaaaaccacagcacaataaaaattaacaggaaagcaacaaccctagactccatgggaaagcgtctaatgaaacacggacagagacgcctaatgaataggattgtaaacgttctatgtgtttttaagatagtgttaatatatatttttatatgttttatctatcatctatccatttatatatcttctatttatctatctatctaatttatatatcatctatctacatatctttcatctatctatctatctatctatctatctatctatctatctatctatcttcctacctatcatctgtctgggaaagaaaattgtcaccagttctatgtaacatctggagaaacaagctcttttaactccacagtgaaggcacagagtaggcgatgcttggccagtacatgatttaactggcactgttgacaggttttctgattccagattcagtgtctctctgcatttcatttcaggtggtcacagtggttatcctgagctacaaagaaccatgcggttgaggggtaaagaaagagaaagtagcttaagtcattgctatactttcttttagttatcattcgttgtattttcactgtactaggaaggaaatcccctgtgtagatgtttcatcacccgtagtcttgggcatgcctaggtacttgttctcatcttgaagttgaaaaaacaatgagcaactgggctgtggtggcgcacgcctttaatcccagtactcgggaggcagaggcaggtggatttctgagtttgaggccagcctggtctacaaagtgagttccaggacagccagggctacacagagaaaccctgtctcgaaaaaccaaaaaaaaaaaaaaaagaaaaaaaaaaaaagaaaaacaatgagctacattatttttgaaactattttggctatatgaacgtttttgtttccagtttctataggctttttttttcccccctaatggattcatttctcagctttgtacaaaggatggattggctcattttaatgcaaattgatatagttggttctgggttttgattcataatttagcttggtttgagtctcaataccacaagtattgaattatgtattccccaagcctaattctccatacccaaatgtagttttttatcatcatatttaagacacataatagcgcctttagaagataagtgggaaggagccagctgtggagcaccttgttttagtgaagcatcttctctgttttgaaagtcatgtattcagtggttctcatgcaccacatatatgttcagcgtgcagggatgtgccagctttgtcagtcccagaagttcatttaagttgttctaaagacatttaaaatattttcttcttatgttttttatttgtttgttttaaaactttaaagctttgtttttattatttttgaagtgtgtatctctctctctctctctctctctctctctctctctctctctgtctctgtgtgtgtgtgtgtgtccgtgtgtgtgtgtgtgtgtgtccgtgtctgtgtctgtagtgatgtgtacatgagtatagccagagaggcttggatcctctggagctggagttacaggcagttgtgagttgcttaacataggtgctggcatccagctgtactactcggaaaggcaattaggtgaccctaatcctctgagctagctatctttccagccctgtttgttttttgaggctgtctctgcatatgtagcccatgatgacctcaaactaagcatccacctgcctcagcttccagggtactaggattacagtctcataccaccacagccatttattttaataattaataatagtagtaatggtatgaacttttgaagaattgttgtgagtcaaagtgttcatactagtctagaataagactatgtgtattcacataattttggcctggtcatttactacgttgacatcaccttgacaaaccattgacaggatctatagctcagctgtctttccagaaaatgagagtccagttaatctctctgaatttcactaacatcttgaatctttacacaggctgtatgggtattcattgatcaagggagatgacctagggagtgtgcccataacttcacgtgcctgtgtgtggtattgttactttcctggtattctctaacattaaagggaccaccaaatcctaataaggaagtccacagcataatggcccggggagtgcctctcaaagattcaaaccttgtagactctggcttcctgagatgaagtctgggccatcctcagcagggctaccttacaccactgttctctatagagaataaggaaagagtgctaagagtgctacagaggggtgtgtgtgtgtgtgtgtgtgtgtgtgtgtgtgtgtgtgtgtgtgtgtgtgtcttggtttctgtttgcagctctgcttgggaaagtccaggcaatcctttcccttgaccttgaggtaagattcccataggatatgcattccccagttctgttcactcctctggatttccaggctcctccttattgcctataatctttgaagcctacaatacaactatcatgcactgatttagacattattaagagactctgttctttttaaacaaagccaggaaagacatcacttgtcctgggaccactgtaggagaatacaacacatttacttagagatagagaaaagcaaaaacttcttaaatacatttttcagtatcttgaagaatgatcactgttttgttttgtttctgttttttgagacagggtttctctgcgtaacagctctggctgtcctggaactcattctttagaccacggtgccccaaactcacagaggcctgcttctgcttcctgagtgctaggtttaaaggcatgtaccaccacacatagcagaatgaatacattttgatatcataagttttgaccaaacacctgagtttttttgtttgtttgttttgttttttgttttgttttgtttttcggtgtatgcctaccattaattagctaagtaggcataatttttttttccaaatagttaattagttaactaattttgaggcaggatctcatctcatatgtcatccagcctcggcatgcctggagctcatggtgacctgagtgagactcactgcatagcccaggcttgtctgggactcactgtatagcccaggctgacccaggactaactgcttagcctggacttgcctcagacatggagtaatcctgccagctttgcctaccaagagctgagtttacaggcatgtgccaccatgtctggcttactatgtgtaggcctttaacaaatgctcttgctaattgttcaatgtattttataaaataataaatcttacttttaaaagggtaaactttacagaacttagaggaagagaagaaggggggaatttgattagattgagaacatttcctgtatgtcttttggttcagaatctacaaggatcacagtgcctatgcccctgacctatacaagctgaggggacaggcttctctaagacttgcttttatatgcaagctaagtaggcataatttctttgctagtgagttttctccttgcatgtataacttccctttacatcttcatatgttatgaatgctttcccctgggtcaaaaagtatttcttacattgtgatttttttccctcaatggtgtaaataaaattcaattgaatggcttcaatttgccataatttatccaagctttcaaatgtggtgagatgcatgcttgttgccagtgttctcctgataaattactgtgtggcgaacatactcctgcattcctgactgcatcctgatgactttcagaataccttcatagaatacaacaactgcactaaaacgcagaacctccaaaagctcttacacgcaaggtcaaattccaccttgtgaggtgccacttgcttgcacgctctctcccagctgagaggatgaatttctagcatgatcacaggcagtagcaggtgtcggttaaatgattttaggaagttattagatcaaacccccccatttggcaaagtagagaaccacatattctgtccctgaatggactgctgagaacccgaacactacagggcctacatgggcatgacagagggtgtgtggtaaaaccgaacctaggacattctaactgaaatgaccgaagtgtttagggaaaaggcagtacccaacatggatctggagggataggtagaattgtagagaagctgaggcttctgggaatagataagagaacaagcagatagctagagcattgaagcatgctggttgcatctaggggaccgaggcatttatttgccagagttcattcattaaaatattgtaatgacattgaacaagtcttttggtttccaggtgtgtggccctgactcctccaaattactgaagtttaatccatgagatgctccagcatgaaaaacatctctggaaaggaattataaagtttggaggagtgggtgtgtgagcgtgaacattcatctgtctgtgtgtgtatgtgtgtgttcatgtggatttatatatctaggggcatgtacataggtgtacttgtagttgtggcagattgatatcaaatgtcttctatttcttactgtaatcttctatctatgaggaaaaaatatttttttcacaacttcatgcatgcacatgatgtattctgctcaccccgcttttcccgtctgtccctataagctcctattcctagctatttcccccgatttactagtttggcttttgttttataccctgttgagttaaagaagggtcatcagtgtgactctgagtttggaactaagcatgagagcctactgggctcaccagagcatggacctggacactgtctccctccaagagtctgctgcttgctaatagatcagcagaattgactgtgtcctgcctgttcctcctccctccatagctaacagaggccctgacttctgtggacacagtcaaccttgtttttgggataggatctctcactgaacttttacactcaccaatttggcaagaaaggttatctagagagcctcagggatcccctctctctgctttcccactaagattatagacctgtatcaccatgcctggccatttacacaagttctggggagcctcatcaagtgctcagacttgcctagctaacagtttattaactgagccatctcttcagtcctgaaaaggaattctgaaaactaaattgcttaatgtctgtatatttaaggcaagaacatagttacttatgatgtcttctttccaagggacaactttcctctgaatgcaggactgcaattggagtgacaaaaagctggaaggcaattgatgaggaaatgtcatggtatttcaagcagaaatctaaaaagaaaaggagtcacgggaaatgtgtctattattaacttagattctagacttatagaaccttagggtttatagaatggttgaaattatttaaagttttgtatctgaagaggcaattccttagcatacacatagaacttctcaagtgagtgtgaatatggactttgaaggtagccaaggttgaacagccaagtggtcctttgcagctcagctttcagggatttctctgatatgtatatttatatgtgtgtatatatgtttatgtgcatgtgtatgtatgtgtacatacatatggatatgatcaatatgtgtacatgtatgtatgtatccatatgtatgtatgtatatatatatacatatacatatatatacacacatttgcatgttatgatgatatatatgcatatttttctcacttttcgtagtactacatttatctgtttgtctgttttaccttttcaattatgaactttttaaaatttggggccatgtcttattatcagtatcttttgatccttagaatactgaacaatatataaataatccgatgttcagaatgttactataataaagcagaaatgcaatatgtaatggctccggtttcttttttataacagctttattgatgtgcaggagagatggcttggcagttaagagcacttttctattctctcagtggaccagggttcagttccaagcacctgcatgaggcctcagaactgtctgtaactgcagtaccagggaagaagctgacagcctttgctggccttgccgagcacaacacatgtgtatggtacacatacacaatgcaggcaaacattcatatatataaaatgtaaaaatagatcttagaaacaaagagctttattgaaataaaattgatatctagaacaatttattctattcagtaaaataaaaataaaaatttatatatttagggttctgcaaccaccactacgagtttgtttgtgaacattttatgaccttctaaaacagatagatacccttccttatgttccgtgtctgtcaacctgagacagccactgcctttccttagcttttcttccattaatctatatggaacacacacacactcacacgtattttaaatgtttatgtatgcctgcaactgtgaaatgcacacgtgctggcttctcacagaagcaaaaagaggctgtcaggttttacttagggttatagatgattgcaggccaatggatttgggtgctgaggaccaaactcctgttttgactctcttaaccactgagtcatctctccagctcccccttttttttagtatgtgattcagtttgtcaacattgcaaaatagaaagtcatggaaaaccccttataattttctgtggtaaacttactactttagcttagagaattctatattttgattttgtttgtggggcagtcttagcttggcttgtaattcactttgtagaccaggctggtctcgatcttacggaaatctgcctgcttctgcttcccaatgagaattcagtacagtttaattagaaataacaaataagacacctaagttcaatctttataaaccctatagagctatatataactgactttccataataattatataagttcattaagcataagaataaagggggaaatgctgaatttgaaatcagaaggcctatgtgacgcaacctcatttgccacttcattttataaaaggcacatatgacctatgaattcttgagatttctcatttaaacattccataacttcaggaaggtctcattggcctggtatcttaatgcttttgaacttgccctgaagagctaaagtattattgaaactgccttttctatgattcccttttctacaagcagcaacactgataatatttatctccttgtttaatcacagttcatttggaatataacacacaacccaaagagtctgtgtccgtcctcgctcacttagcctactgagaactccaggtccttttgtagttcacggccatttcagctttcttcttcccgaagcttatttccaacttccttattaggatacattttctgccagtaaaaaccatagtggtttttccaaacacatccatcactaattagaacttcacacattgtatcatgtcttaagagtctaagaccagtggctaatggcctctggggcaacatgctttgaaatcatcaacacaaaattaggggcagctgtgattgctcttttctcttccttctctggtttccttccttccttccttccttccttccttccttccttccttccttccttccttccttccttccttccttccttccttccttccttccttccctccctccctccctccctccctccctccctccctccctccctccctccctccctccctccctccctctctctctctctctctctctctttctttctttctttctttctttctttctttctttctttcttttttgagataggttcacactgtaagcatggtggtccaggaactactatgctggatctggctgcccttgaattcacagagctgagtattggttttgaaggtatgtactaccataccgggccactttggtttcttaagtccatacatcaataacctcagatgctcacgagcactagggaaggctgcaagaagattttccttgagttttaatgataattaaacattctatacttctcatattttttctgtaacttctctattgagaataaggtcttgatagttgatgaagaacttgaattaatgaccacagggatagtcttggtttgccttagttcttgaagccaagtcctcattacttctttgcatgcccttccagtgtagaaaaatctcatgtggtgtggagtggaggtaaagtaggagtaaacatggcctctttttttttttcccagtaattgcttctaatggaagcctaatgacctattatgcttatttcgaagagcggaacagcttaataggaagccggtgaaggatttgagaaattatataatagaaaccaaaatttcaggaactcacacatgtggttgagaatcaatacttcattagagaatttaatgattcagtggtttgctggtgccaaatgtcacccttactttaaaagccgtaggaacttgtagatgaatattctcaggagtgaggaccaaaggagacggctgtgcttttgttcttgtaggtgtttatttatttaaattctacatgtagacaataaaaggtgaggagagtagaattttcttacagcattgaaatattattaaaatttaataactagaagtgaacttgacatttttaaatttagcttcctctttggtttctttgttctgcttttatgtttgagacaggaacttgttagagctcaggttggcttcacaatctcctggctcagcctccccagtgcttagagtatacacttggccttagcttttgcattttgtgtaaaatccatggaccaggtgcgtcaaaaggttaagtgatctgtcctaactttcatcaatagtgtcagcagctaacttctctcatggcgatatactctggttgtgggttttatgatacgttacatctaaagtgggctttgtaggtctctgagatgaatggttaacctcaaatgatatacctgatggttgtaaacatagcttttggataaaatgttcatgctaacagtttaactgttgccaactccagatgttattgtggttattttactaggctttcaactgttttgtatacttgagtgtttttatgatgaaatgctggaaaagtagcagccattcaatcataagatgggtcagtttcctgtaaggtgcttatgggccgctatctctcatagccaagttaagacagtgatacgttgaaaatgcttgaaaaattctccatttacctggtgataagtatttgcagaacaaatccatagctctcatgctttgaactcaaactcaaatgaaatatattttacatcactatctgttctttttacaaaacctgcatatacctcctatcaacatttataactttgcaaaaacatgagatacgatatgccataggtcacaaattcctgtagagattaaaaagaaaataatcttatttctttagcatccagctgaattcctatttaggcacagtttccagccctttctggaaatgttgacatttctttgggacttgcataaggggtatgcatcctctcacacatattgatgcacatgctgattttatggttctctattcataaagattcaatttgcagtcctcatctttatttaaggcacatcagttttgtcaaagaatcatttatttggattaaatgactgtatagctcatttgtgttacattgttttattttgcttttatcaattctctgatatcatttacgctatctatttcataagttgacttaatcacatctagagtggttctttcagaacatatgttagtatatttttgggggtatatgtgtgtacatgtgtgatgtatgtaagtagatatgcatgtgtgtatttgggcgtgcttacctttgccagtacatgtagatgttagtatttgatactggaatctcttcaatcaagcagaaataataataactattattattacttggtttttgacaagaaatgttattggacctggagctcaccaattcagcgaacacttgggatattttttttctctgtcatttagccctagattcaacagacctgtgactctgaaatcacatcttcaagtctttcagcaagaatttacctagtgagtaaatttaaatgagcatcttctcaggcttcgcctcattcctgtttgagatagatagggtctcaggtctgtaactcaggtgagatagatagggtctcaggtctgtaactcaagctgggtcggaactcaggttggttttgctctcccagcaatcctcctgcctcagggtccagagttcttgttactcttaaaattttcaagtaattaaaaaaaatcttattatttctagcgtgttctacttcactgtataaactgacattctgtaatattgcaaacattaagttatagagtatggtatagcataggatattttgatttccacacatgaattggatgtcatgatgtgacctagaaatagctgagttgttggaagattttacattctatttatttatttctcacatctagtttgtgtgttgattaattgctcttgattaacttccaactccttaaagtaaatcaaaattaacaaatatttattgcagcttgctgaaaatcttgtttacgccacatagcgtagttgaagtctcacttttaataaaggtcagaaatcaaacactaacatttaaccaccgcgtgtatttcctgatacagccgttacacggggaagtgagtgggtgcttcagtttggaatcagagagaggaggacactcatttaaataattctgcatgatttttttgttttttgtttttttaatcttgctggagattgagtccaggctgttgagcgcacttgacaagtgtgttaccacagggccacccctggtgcgacatgctgttttccttttcatgatatcagatcctttgagaaataactaaagaattgtaaaacagctaaatgaatgaagggaaccctaggcaaggaagggtaaaggggatttctggacataccttgaacagaggagtgaaatgggtgagaccttaactgttacaagtaagttattatttttgttgttgttgttcatacttgcacttaagctggtttctctaaagtatgaaatattgttttatggctttgtgggggtagggcttaatggctaactcagcaaagtgcttgctttgcaaggacaagtgactcagttctatatccaggatccatgaaaaagggctgtgcctgttggtatgtacttgtgagctcactgatgggtaggcaaggactgcagcatccttgtgggtcactgaactgcccacgaccagttatgacactatctcagaggagggggaggaggaggaggaggaggaggagatttcttgagggctgccttccttgcacaggcccatatcatatacagttccatgtacatgaacatgccgccatccccctttcaaagaaggttgctgacagtgttattgagaattgtcttctgtcttccccactacatatgcctccatatccgtgaacacacacacacacacacacacacacacacacacacacacacacatacaccatattaaaatgcttttagtgacctggattttagtagcaatgaagcattttgacaatttttggctatgcatattcatcatatagatttcattagctctaaaagtggaatttatagtgtaactcctggatatatgaaagagaaagcacctgttttataaatatctaggagggaagaagaaaagaaagctgaccagctcagtttgctcatcagagagcaacactagtaacatcgtatttcctttctttttactcagttatgcacattgaacacactgagatagtatttcacacaatgtcttctgctttcttaagtaaggattgtgttggcagcggtgatttgtttctaacggattttataagcattttagcgtttctttatttgaaaagttgtcattgtagcaatggctccagtcccacagtgctctgtattttagaaaatgctttttcaatctgagtttggtcttataatgtggaaatgactcccacaagttattcttagacatatacgtgtgtgcgtgcttcccataaaaaaaaaaaataagtgtatgtttaaaaaaatgtaagacaagctactagatctctagaaaaatccaattatttatttttatctgtgtatctatgagtgactcattattccatagtaaatacattcttgataccatgaaaactttctttttctgttatgattcctcctatgagtgcagtatgtggaatatttggtggttgtttttcagctttgaatattacagtttgtggcatgtctaatggcttttaaaagacaaagcaaagtcattaatgtccacaagtgttttatctgagtacagagtcctgtaatgctttcagaagagggtcgtcatcacagccagcctttgggtcccccgtggctccctattgttattgtgcaaagctgtactgctctgaaaaatcctggttctctgtgaataaagcattctctttggccctggcttgatagagtctcttagtgtctgagcctggtggtttgtttcagctcacagcccccaccaacaccatcattattgtctgatagttgtatgtagaacaccatggtatgccatttgtgacaaaaattaattttacatatagtgaaattttattgtgcatctgctaaaggtttgccttgcccgtgaggatgccagccctggcgtctggcagtagcacatgatagtaaggagcgtctcctgaggtgattcagggtagaacgttgctatcacttgaccagttaggtcacagagttcaatagatcttccttttcaatgtgaccataagacctcaactctaagcctatttctgttcttctttcattatgactcagtaacttttccttatcagctttggcaagagagcacctgtcaattacttggagaaactggctttagaaatgaatcgatattctatttgtatgtcacctctgctttgaaaggcgccatacaatcctgcattcttgcaaccagtcagcgttagttcctcagcttcgggtatggatccacttgatgttctgcaggtttctttcaaacaaccaaactaagcaagaagtctctccttaggctgctgagctcctgtaactgcagactgagtttcctgatatttaggttatttaggagttgagaggaaatcatcttgaggattccaaacagcatttgagtctcatttggaatcttcctgtcctctttgcaaatgctctttctttgtgagttaagaagaataatatttaagttgtgaacaaggtgaatggtcgtgaagttcatgttgtggcatctctttatggacattctcatgagatagattttgtgtttcttattttgttcttttaatttgtgggcattttcttatttgctcatgggaataaattctcattgtacactattgacttaaaacgtaataatcacacatcatatatgagctcaatgttttattcaaggatagcccaaaagcactgttagacaccggaaaataacataacttgtctttgttagttttgtgtggtgacatcgtcctacacaaaacacaactttagattgtggcatatacatgtgcagagggagctgttaattcaaaccaatgagagctggtaaaaggggaaagggtgctgggtggtgtgtctaggatctacagtaatcaccatgctcagcaacaacatctgttgctggcaatattggcaggatcataggagaaagcaatcattaaaattagctggtgcttgctttaagcaccacacagcgcactgacattttcaatattttctctagttttatgttttctcattccacaagtatccacctggttttgcctgaacggcttctattatgtctttttaaagaactatcctctacctttctttctgaatcgattagaggctatagcttgtgtctccagtgggccagagtggcctttacccctcatattgcaactgggtaccacagccacctggtttgcatttggtctcactgagttttaagaattgtagtgtgaaggagactcattaatttgtcttattttagttgaaggggatccatggactagatagagtatattggggaaaattctgggggggaggggaacaacttaatgtcgtggccttcttggggacaaggggacaatgctgtcttttctgagcctctcaacctctccttcctttccctcacctgttcaaggagaggaatggcattgtgtttttagaagttagaatttgtatttctcctttcttggtcagacagatgacagggacacacaaaggcatgcacgcacacatgcacttgtgtctacattttctctgtctcttgtttttattttattttatttttagggacagatatgatttttgagactaaatattttgtaccaaaaatgtctttcgagctgcctctgtggatgactttctgtacactcccttctttcacaaggcaggacaaggctgcattatttgccaagaagtgaaatgagtatagagttggaaagctgacaactcctaaccttttagggtgttaatgcatcaatgcactgttcaatggttgatggagtcttatcattcattcatctatacccagattcatttccaaagcccagggacaggacacaacaatagacaaatttgatcaaaaggtctagctttctccaaatccccatttcagctgggaaggaagcccagcagtccttggctgagggctggctggggatggagcctggttgctgagtgctgagaagagaccttcactgtggactcatcttccagctgtctgctttgcttaaataataacaaataacccaactgctctctggagagatctctgttctacctgtgagcccaggaaacatcagcttctcatggattatgaatgctgatatggttttgtgaaggagtttcagcaaagtatcccaagatcttcgtataaaatttataagatgagagttcatttcgtagccaaaatggtgtggggctggcttctctctggtatctctagccttttgtcaagcagacaagccaagtcagagaactctttttatttctggaagacactagatttaaatgaaaaaacaaaacaagacaacagaaacccagcttgtaaatacagtttaatgacattttaggaaggtttaatatactaacggggataataaattgtatctttcacagcccactctgtgtggattttttcatgtaaatttcattaagttttaattcacattaaactgagaataataataatacccttggaccatgggtgggctttggggtctcagacggagttaagaagaagaaaactgagaaaggaacttaaaattatggttaagctttgccccataccatatgatacaaagtaaatgcatgcttaaaattatattcttttgcccaatagaatgtctgttccactagtttatttcttctgactactgagactaaaatactggtcagactgtcagtaattttctcctctttccctctacctggttgcagcacaaacaaagaaggcagagattttgattcctgcatgttagattttcagtgtagtcttagcgctgcaagtctgctcagccacctgattctcctcttgttattatttttaacctgttaaaacctcggtatttttatatatgtgtaaatataattagcatatagacttgcacaaaatactaaggtcccagcttgatttctgtctctatgataaaaacattctgaccacaagcaggtcaggggaggaaagggtttacttcatcttacacttccaggtcaaaggccatccttggcggaagtcaatcaggaactcaagcagaacgttgaaaccgaaactgtggaggatttttctgcttgcctgcttactccggctcatcctactttcttacacagcacagggcactaggccattgtgcttcaactaataaatcaggacacccctcacagacatgctccagtctaacccagggaagacaactactcaactgaaactgtttttttttttggggggggggtcggggtggggagtaggaagtgtttttttaggttgttctctgctgtgtccagttgatagctaaaataacccaggacaaatagatttttattgtatcgctgtcatacctgtccgagggcactttggttctatcacattacctatcattagttttttgatggctatgggggaatagcctgaaagaatatgtaaagtgttagtaattaaaggctcttctgcctgttttctgaaaatgccatgaaaagtgtttaattatactcttagtgatcgacaaatattttcttaaaacagaagtgataaagtgtgtatggcagaggaggtctggttgattctcagacgagcagatgcagaagaaatatcaacaaaacacagccaccagcatagactaaagatgcaaaacaagggcaatcatagattccttgagagtttacagtgaacgtttgtgtgtgtctggtgtatgtgcatgcatgtgtgtatgtgtgttcatatgtgtgtagatacatgggggtgtagttgcatatccatgtgtgtatgtgtatggagtctagaggacaaccccagttattattcctctggagacctctaccttattgtttgagacagtggctctcgttggcctggaactcactgattaagctaggcaaaaaggccagcaagccctgaacctgcctctgtcttcctgcccaacctagcaatgacaatcatgccaccacacctggatttatactgtgtttctgttgctcaatctcagatccatgtgttcacaaggcaagtgctatatggattgagccatcctctgtcccttggataatttttttaatgtaagcattaagtctcagctagctagatcattattttggtctcagtgagtcttccaaagtaaaaagtgatgaaatgattataggtgttttagatgtataattatgtgtcatttgctcattcttgagaaaaacaagtgaatgaaccagtgggtgagttcacgaaaggagcctagtggagtctgactgttgtcagggccttttggcctgtgctttccattttcaccagtatactactcaagatgatctctctcagcaggaagtgacagcacaccctgtgggattgcttagtggttttaaatatggggacaagtatgagtttggaaataaatttttcctaagttattcttcttctgagaagttatttatgttataatggcttagaagtaagtctttatatcaaacaaggaaaagatctggcaatttaatatctgaattcttaagaacccccaaattccaaaagcacaaattagaacactttgtttcttcttatcaaaggtctcacctggggtagtataagtaacagagccacttgtccagcttttgtttcctcatatccacttattagggtaccagataatgtaacagaaaagttgagatgcataataaaaattgaaggattatgaaatgtcattacaagtcagccactattggtagtttctgaaagatggtttttagtcatccaaaaattcttctgttgaaggcatattgagaaactaccagatatttggctcctgaggagtcagtaaacatatgcattttataagcatgtacatttgtcactagtgcagcttcttagaaacgacttcctgtattgctttgccatgatgagtgttaccaataattatggatgcagtttttagatgtatggatgtgcccttgtagttctgagcctttgtaagcatgttttcatcaatctctatagaatgttttcccaggagtcttgtactccttattcttcttttggaagcccttgctgactgcttctctttctctgtgctcttatggtacccattgctgccctgacagttcatcctgatcaatttctgaatgcctagctcaaacccattgccctgtgattcatgcttgcctgggtcacttactttctgccctttctttttctgaacatgtaagccattgttattttcattccttcctcatgctgggataatacctgcccagcttttatgtggctttggggatccaaattcaggtcatctcctttgtgcggtaagtactttatctcctgagccacctcctcaacctctcaactgtatcttaaacagccattcacatctctcttctctgatgatcgctcaaaaccatgtccttgtaactggaccaaagtaatagtccccaaagttctctttgcttctgcttgtgattgctctcctgcatcagtcttctcagggcaccagaggtcttagagaagcatgcactgggtcctcttagtgcactatctagttgaatcacaccgaaagcctcacaatcatactataccctattgcctttgtccactatgtgtaattctgggtgatcaagtttctgtctgttgatgtgtttttgttgctgctattttgattttaagtcacccctgtccctttgattcactacatgtgagccatactggcctcttttctctttgtagtccactcttaacatacctaccacagtaggcatgcagtcctttatcacagtaggcatgcaattactgaacatacctggaggcagttcccactcatctccctgtaacaattcttgcttagttaagcagttggccaggatggtatgtcatattttatcctggtttaattctgtttctatatactagatagagtatctgttggtaaacttgaccaatgaagaagtatcaactcaactattattttaataactcctgttgttaactgtatgctacctatatgttgacctatgaagtatcaattctgagcaattatttaatagttcttattgctaactataatttatatgtgtgcttaagaactacttaatattgtggggcttggggctgtcatatggagacaatttatcagatagcttcaaatgataaaaaaaagtcatgctgatgagagaaacaaatattagcaactcttaacatttaattcataatttataacagcaaatatggaaatttccactcttggaaatttatatttgtttctttatcaactgtggagctctggttgattttgaagtttgcattttctcttacatatttttcttttgattgatttcttaagatcaataggtggaggtaaaattcacataaaattgaccaaagtaaatgtttttacttttaaccttaatttttatgtcaattagtctagttatttgatattgcctgaggggggaaaatagaatatatgttcaatttttttttccccttaggaagttctttcatctttgcccaccaactcatggggcacgcactctgaattctctccttgttctgctcttaagaactgtgagcctacattggccctgcttggctgtattctaggcacaggtaggttttggcactgccagttcacagggtgccaaaagttcacagttcactggtaaagaaatctgttaggcaccacaaggaattttggttgctttcattcataggtcctttgcttttgaatctacctgcaaaaaggaatttattatcgaactaagccccatgaattctatccagtccctgcattattgattttcagaccagctcattccattatactgttgtactgttggctaagttcagtgtcaatacatgatcggttgggagatcggaggctcattttcattgtgtttagccaacgtgtcctgtgtgtttcactgggccctgacttgcatctttccacacgtggcaagttaatgatttgaatccacttttgcttgaatcgatccattattgtgttactctgtgggcagcaagcaaggcactccctaggagagagacctgttgtgtaacacaagtaacatcaggaaatgacattttacgttatctccttgtctccctgttcagtcaccagtcagttaatatcagttaactattgggaagctcctctatctcagtttacacgagatgtgtcctgtgttaaagccagtgttactgcatgtatgaaacaagacccctcagtctggtacacgggagtacatttggcaactacttcctcttcattttcgccaataccctacacttataaatagtattctttgtggattttgcttattcaggccatgggcattaggttatatttgctttaattatcttcctgcttctgtagacattatgtgtgtggactgtacgatcgatcaacttggtatttgcaagaggatgagcctgctttttgtatacctttagctgatctcaggagagttgtatagactgatctttagggcccagtttatcctttctttgttttccttctcctcacaaatgtctcccaggcctgctttgcatggttagtaaatggaagcacagccatcttgcatttcataagtggcttcaagcttctattcagcagagaagtacagttgcacaggggcacaatctcattcattaccccccactcaggcccattccatgcttgctttggagtttagggaggcatttctgaggtctgtactccagccttttctccagataatcaaaactctgttcccgggtgcagcaggcctctgggaaatggcttgctttaactggagttcattgtgtctttaaaagcttgcaaattgtatgttggtgctttaaagagagaacacatatgagtgttaattcacatgtattgtaattcaaaagataattttttttttttttgcagagtaaattaaaagatacagaggccattcagagatgccatctgttactatttgagatataattagggtgataatttttaatgccattgtcatatgatgggaaagagaggctttggggtaccaattaaagattttctccttctgaatgccatgttaattccaaatttaaaaatgtagtgggctcaaagctttccttcaattttaaaggcaaactcattctttcttactgatgctggtgggagcatcctcatgagtatacgatcataggtgtttcttcagctacaagcctattatgccacaagctagctttcaacttctaatttgagttgatagttctgtgtattaattagttatgaataaaacatgggaggttaatagctgtaccccggccagaagactttgtagttttaaaaaggtgctctaaatccatttgtgtcaaaaatccttcagcaatcatgaaatttcagaccagtcatggtagtccacacctttaattcagcactaaggaagcagatgcagaaggatcatgagttcaaggccaggctaagttgcatctgcagctctcatttcaaaaagtaaaaataaggctggtgagatggtttagtgggtaaaagtgcttgccatgtaagtctggtgatcagaatttgatctgtggcacccatgatgtaaggacaaactcgactcttgaaaattgtccttgggcctatgtgccatggcagacacatgccacgcaacacactgctactaatactaattttaagtaataaatgaattgtataaagtaaacaccatttcaatttcatctgttagtatcttgttgctttgttttatgaatattttagttttatgttcactatatattggatggtatgctaactgtggtggtttgaatatgcttggcccctggaaatggcactcttaggaggtgtggccttacagtgggcgtggccttgttggaggaagtgtgtcactgtgggggtgggctttcaggtctctatgctcaagccccacccagtttagaatgctggtctcttcctgtttgccttctgatcatgtctgcctacaagatgctattcttcttgccaggatgataatggattgaacctctgaaattgtaagtcagctcaattaaatgttttgtgtcataagagataccttagtcatggcatcgcttttcagcagtggaaatcctaactaaggcagtaacttggctcgttgttttttctctgtcataatcgtttaatacatggaagttaacatacattgtgctcatattctgaatcagctaaagccaaacattggtgctgtactaccaaaatataatcgctaaagaatagatttgaccaaatacatttcatttatactcaaacctctaacatgatccatttaggcataatatttaataagttttgttgttctatcgtaatttaggctttttgaagcagtgcttttataaaaatgataatgaaatcggccatgtacaattcttgctgtgattaaactgttcagtctattaaaacacactgattgattttgttgacagttagcaaatagcccattatattaaatacaattgcctagtgatcacagcaactatatggtcttaaaggtctccctcaaggtcttagtggtggtgcattacaaatttgctgtcagtgagattaaataaatcttatttattaataaaggaaaatagtttcttaaggcaatagaattgcttggcatctatgttctatttaaatggtgccattattatttgagaatgtcacttgtcaacatgatcagtttacaaatgttaacacctaatgaagcagactattggtgagtcagaacatagtttcacagccccgtgcaccagaatgtgggagaggtctggtttgcctttgaatctgttgagtgcctgtgtggagaaacgcgttaaagtgtcaatgatgagtaaatccctcagtgctttccttcatctgtgggaagttgctctagaatttcactgtttttggaccaaatgtatcaatgctataaagtatcacagctttgcacatcctagcacatatgtacagacatgattgaagaagaaatcttaaatattgcctctaaacatccctctagccctgactgtgattgtgtgcgcgtcgtgttgatattataattgaatgagaaataaggaaacatttttaaaccacacgggtgagtgtctcaatatgagatcaccgagaaagagaattctgtctttaaacttggagtatgtcactacaggaattcgttgtggatatgccttgatccagaactttctaacagagctccagtgagcctaatgggcccacctgtcacttttctgccttctgttcatctctgtctctgtcacccctccctccctccctccctccctccctccctccctccctccttctcctttgtctctctccatggcccacccctactcccctcccttcctcacccttctccgagaataagcgttaatatgtcattctcttttttacatcgctatactttagacaccttctgctcatactgagtggcttctttgggctaggttgtgaatttaaggagctccttcattgtgataaccatagtggctaaggggaaaataccagtacggagtaccagtttaaatcatttttaagtacccacttgttctactgagccttccttctggggtttattgtttgatatgttttatttcaaaatgggttccttcaactctgatgctgatgaggtgcattaatctgggtgtgtatgtggttgcccttttagcgcctgaccctgttttaataaaagcaccatctgcttaattggtgggcttgtgtgttttccctgttttctttttctttttttcttttttacatttttacaaagcctggttcaaaagggcaacactaagtgtaccctttaaaatgtattatttgggaagaatttacatttccaccctcagtctggtgaatagatgtggtaactgagtggtaatatctaaaacagcactgtttttcttgatcctttgttctgttggtagatcattgtttctgtagttcatgaaactaagccttccctgaggtttgatgggccgggaccaagacagctctgggcatttacctatcttagattttctacttttcttaattcatttcttaattaagccctcttgttacatttccaggagaatgaagggagaataggggatttctgtagaaggcagtatagaggtcaacagaagtgaatggaaggaaggaaggaaaggaaaagattggaaggactcaaaggaagtgcaaggagggacttggtggttgtttctgttcttcccgtccatactggacatagcttggagcttgagaccaagtttctaagtgagcgtggcttggtgctgtaggacggagttggtgatccagcacctgggagatattctgaagccaagctattacattagccaaattggttaacttctctgttttcccctatgaagtgagatggtaactttatcattaccttttatggttgtgtgatgataaaccaaacaattgtgttacaaatgcttaccagggattgaagagattgtttagtggtactcttcttaaagaaaagctcagtcacgttcccagtactttcctggttcggtcactcccaactgcagtaactccagctccaggggatctgattcccccttctggccactgtgcgtactgcactgattaacacatacacacaatcaggtacacatggatacacataattaaaagtgtaatttaaaaatgcttagagaagtatatttaactgtaatgtacatattttattataatttttaagagtaggatatcaatataagtgaggtaaaaattcatggattgtaaatcattttagtgagaaactttttttgttgttaatgtgaatagaccattcatatatgaaattgttcatggctcttcaaagaagtcctgcacttttctgtgcatctgtcttcatgcctggactgcttttcttctggaatcttctattcatttgctagagcttttctctgttatcttctttgtgaattccctaataacaactataaagagatttagctcacttccaaaattgagcttttgtagtacttagtggtttttaatctagcacttgatccattataatgcactcatattcttacctttgtacgttccctcactggagcctgacggtgagtttttccatcattttagacatgcacataaaaaaatgaaatgcctgtctgtggctgacctttggtgaggaaagatgtgaccatttcatagtgttctcagctcatactctcagaaggagagatcatggcgtctttccctggaaatgggtgtctttagcatgtgtagcaagtattgttgtttccctgcaaatattcaaaggaactttcatttaatttgtcgaagggatgttggtgtcatgtttcctttctgtggtctctctcttccttgactttgttcttttttctattcttatcccttccttccttctgcctctttctgctaggctgcagttttcagggttggggaatatatttatttgaagctgtgctcacttttactcattcccacagagatttctcttctcttagtgtaaataaattttcatcctgttcattagttacagcattcttatgaaagtttagtcaacaaccagttgaataatttctgtttttatttatacatgcttataaaatggcctcctatacttgtcactgaaccagtggtttatgctagcaacagatgtttcctacaatacataatatgatgacataaagtttaagaataataactaaatgtaaatttgtggcattgcctgataagaaatatcctccggtgtagtgtttttgttggaataatgatggttgttttcctcatatctttgtggatctattagaaagcttctggattgcagggctttatcacccatacccaggggagatgacctcgaacagttagaggtctttatcatcaatgaaccttttaaatatcttttctcacaaggacgtcagttattttggggaattgggacagaattgttgaaatttccatcccccttgggaaatgacttgttattgtggacccaggcctgctgaaggtaacatctctcagattctacagtgcttctacttaaaataaggttaatgtagataataggagtgtgtgtgtgtgtgtgtgtgtgtgtgtgtgtgtgtgtgtgtttactactaggattagtgtaaagcgagcactggccattgtggtctagagagccatacacataaaataacacttcaaagaaacatagtgactctagtcccagccaaacagatgtattcagaaaacaaacaaacaagcaagcttgttccaaacaaattcatcattactttgttgcttagtttatggggcagaacagtggctctgttgagcaacagtagctctgttgagccgaggacaaggcatgtgttagacttggaatcggatttggcatctttgctagctttttgcacctgagttttctgagctccttatctttcatcgtgtctgtaagatgagaaaggctgagtcaatacatatagtaccatttcaacccagcccaacaacagaagcattggcaatgttagtaaagacttggcccagctagtctttttttcttagatttacagatatacttccagtttacctttgaaatgctatagagtactgtattgatgactatcagcacagcaggagtccatgaagctgggtttctttttgttcttttgtagttttgtttttgttattgttgttaacatttatttacttttattttatggatgtaggtgttttgtctgcatgtatgtttgggcatcatttacatgcattgcccaagaaggcctgaagtaggtgggtttcagactccctgctggagtttgggcaggttgttgactaccacatgggcgcttggggaatttatttagccctggtccttggagcagcagccagagagctcttaattgctgagccacctccttatccctccataaagcttttccataaaggaattgaaatgattttaatgactcggttcagttttaggttgtggttgatcccctttagcagactggagaaggttgtgtttcattttatcaatgctccccagaattagtgacagtaaagagccacctttcagcagattcccaagtcagctgttgaacaactcctggtgtgagagtgtgacttgactcccagagccttgactgtggagtggagaagcttctcatggtctaacgtttccagtccactctttgctttgtcagtgttttagagactcaaaagtcttttttcccttcccttcccttcccttcccttcccttcccttcccttcccttcccttcccttcccttcccttcccttcccttcccttcccttccctcccctaccttaccctcccctttccctcctctcccctgccctccccttctctctctctctccttccttccttccttccttcctttcttccttccttccttccttccttccttccttccttccttccaaattcctatcactcaataacagacatttacagggctcttgaggacattgcagtgcttttgttaagatgtagagaaaagaagggggcttttagtaaactggtgtttgagagagcagataaaactatcttggaacaggtgagatataacaagtagaagaaagtgaatgttgagagtcacatgtccagaattggcaacttggtgaaggtttactgttggattctaagagtatgaagggcaggcaaggagggcaaccacaatgaggatgggaggaatctttttgagtagattgagaacgggaaaaacctagtccttggccattgaggggttgttaaaggggcgaattggggatgtaataggaagagtttggtcaaatcacccaagattctgagatcttgccaaagaattcaaagtttattatttcaagacctttggctgttattgaagatcttgaaggagggcaccattgtgctttagcaaagttaaactaaccatcgtgttcaagaaactcagaacagtagtgtatggaagggatgaagggacctggcactggattgtctattgcttttctattgctgaagcacgacactataaccaagatgatttattgaagaaagagtttattggggactctcagtttcagaaggcgagtccatggtcatcatgatgaggggcacagcagcaggacgtagtgctggatcaatagcagagagtgtacatctgacccaaaagtactagtcccagagagagggcgactctgctccagtgacataatcctctaacaaggtcacacctcctcacccttaccaaactgtctcactaactggagaccaagtgttccaatatgtgaacctggtggctcattctagctaccacattgcactccctggggcctcataggcgcatacacacacacacacacacacacacacacacacacacacacatgcgcatatatatgcacaaagtgtattcagtccaacttcaaaagtctcaataatgtttcacagtttcaacacagtttaaacacccaagttccttctgaggctcatggaagtttcttaattgtagttctttgtgaattcagaaaaccagttggctacttggattgtacagtagtacagaatatacgccaacattccataagggaggaatggctgcctagtgaggaaatactggaccaaagcaagactgaaactcagccgggcaaactccaaagctccatgtctgaagtcaagtgcctcccctccagctccgctgactgtaacctacttctattaggctggctcagctcacccttttcaggtctctgtggcaaatcttccttgggtctggaatccgaacccagtccaggcttcacacactggtttctccaggttttgatgtaggcattaccctgttgcatgttcagcagctttccttaacctcagagcaagattccagggacctctttagtcctgcatcctttcctgactctaaagccaagttctgctttctgcttggggtggagcctggcgccttgcttgagccttgtttgcataagcttttctctatggttgctcttaagggggaggatcatttcagccttgtgtttctcaagtttcagggctaagtgggtggggtcttgtcctgagggtaccactccctttactccatttcacattaggtctttcagccttggctccaatgtttcctggtgctctccctgcctcccctcagtgctctcctgcctcccaactgattggtttgtttttatttgccccacatttgctctttttcattatagatctgagtaagaatgaccactaattaacaagcaacagaatcaataccaggctgtcctaaaatctgttttgccaatgaaattagtgcaaaaattcttccatttagcctcaggcagatccttaatactccggtaaacagtagtcacatgttggtttgtttgtttgtgtgccttgtttttgttttggccaaaatgtcacaagaatgacccaacccagctgctaatactcttcccctctgaaacctctctagctggatacatacagtccaaattgcgctcagcatggccttccaggcttctactaggatggcctattatggtctgcttctactttttaaccactgtgttaggctaaagtcccaaagtcttccatactcttccaaaaatgcagcatggtcaggcctgtcacatgtgctaagcccacagtgcagtaatgcagggtagatttattaaaaacaaaacaaaaaaaatccatgttccgccgtcatcatatctgcagagatccctgtgggccacttggcatatgaaaagctgtctaattagcttactttgagtcatattttatattgtaaactttccatcgagacatttgataggataatcggagtgatgcttatttgtgtatttgagtcctgtgacttattgactcaatgatcagaattgaaaatgtggactttgctaagaggcattttgcttgtcttgggcttatcactgatacagttttaaagtcattgcagtggaatttacccggattccccagaggagacttgtgaggagctgcagagctcacagagatagattagtgtgtctgtggtcagtgaaaagctaccaaatctgagcaaaagtaacaataaaagccatgtgaatccacctgcctggacatttctctccagtccttcagccctggacattgtctcccatccttcagccatctgctccttgccagaaccaactcccattgcacagaacaaaacttatgtgcacaccttgtctatttgaataggatttgaatagaatacattccatcttctctatacaataagagtatcaagcagtatcaggtgaggcttaagtattttaaaaatataagcaaaaatggagattatttacttatttatttatttatttatttatttaaaaaaaagcctagtcctgaaagtggaatgaggttgttagggatcatttctggctaaaaagcattgtgttaatcatggactgagcaatcatttctctttagggaatgttttataactatatcacagaaattcaagcctaactataactgctaagtgatgtttaatgacttgaatcttcaaagacaagcaaatatggacttggaaaggtcttaactaaaagatatgttaagtattgaaaactcatttaaaaccttaataaaacttcagatttacataactaaacctgcctgttacttctcatctttccactttatttaccatgacactaaaaatcaactcaacaaatacctaaaatccccttagcatagggtccgtaatacatgggttttgtttgtaaagctttcaggaacctctgtagattataggagttcactgttatatctatttataaaactgggctaaagacataaaatttaggattttaaccattttaagtgcacatttcagtggcattaagtatattaactgtggtatgtgacagcggtcagcatctgtttctagaacattctcaccatccacaccagaaactctctacccatttaaacagtatgtcctctgatgccagcccctggagacccccattctataccccatatctatcctgactgcagtaagtccaccacataaaggaaaacaaaatatttatctttgtcttttgtggctggtttgtttattattgagcacggtgcccttaacatttatctaggttgtgtcagaatttccttcttctttcagtatggattttgttctattatgcatgtgacagattttgcttatcggttcatctgttggtggatactgggctatttctccctcccggctgttttgacaatattgctgtgaacattggttaacaagtatttctagaatcactactttcagtctttttgatatgtaaacaagacttttaacctgatttttttcatctcttacgtctggtctcagtatacagttcttttaaaatctatatttatgtagtattctttcatgattttagccctgggaggggagtggcaggttctaggccctctgtgaagatttaataccaggtgtagattctggaactatatgtatattaagccccatttctgtcactgagccacacatctctacctattctttgacacgtgtgacctccaagtgcttcaaacgtcaacctgaaattattggtttctatgccagaagcatttctgcaaagctcagctctttagaagttcagtgcatgatgttgctttagaacttaaactttcaatgctgctgttgctgttgctgctgctgctgctgctgcttctcctcctcccaacccccatctttctgctccttcccactgcatacatgctttgggaaattttcttcattcctgttgctctctgcactggactaacccaacttactaactcatttttctaaactgtgtggtcccccagcatgtggaaatatgttgttgatttcattttagttggcatgttgcgattaagacttcttgctgtataatgaacttcaattttcactgaagattcctggagtctgtgggttatagatcacatgattggcagttcctattatataccgtaagaggagcctggtctgccctactccccatcctggggggggggggttgacatctgaagctaaggactggattaactaatcagggcctttatcctgtttgggctccttacttttaaaacagcataaacctttaggctatggaaatacggttctacaagtgttaaattgactcatgatttccaggtgtatggaaaaatggcatattgaacttgtaactctcttcatatatacgcgcacactcgcgctcacacacacacattgaatatgaacaacagcaggcagcaattacttctgtctttgaagatcttgttccttggccatgagacaccagtctcattgcttaccttcgattttaatactctgcatttgtaagcagatacttcatgtgtccctacttattttctctcattttgcaaaagatagaatgcatgttttgttttaaggctggggaatcaaaaccccttcctgattattgataggagctgcagttttgaaggatagacaccaatactagtttcttttgtcttcttacagactaagttactgtattaggcttagcggggtgtgtgtgtgtgtgtgtgtgtgtgtgtgtgtgtgtgtgtatgctcatgcatgtgtatacctgtgttgtgagcacaggtgcctttataagggttagatgcatgcatgtgcacatgtgtgtagaggccagagattgatttcatgtctttttttttaattgctatctactttatatatcaagactgggtctctcacaggaacccagagttctccaatatggctattatagctcattcccttgctctggaaaccttctgtctccacctcttaggcacagagattacaagcaggctggctgacattaacatgggtattaggcatttgtactctgctccttatgcaagagttttactgactaacatattctctagtctgtattttaaaagcaagcaaacaaccaagcaaacaaataacaaaccctacagaggtttttttccctttgtgtcccaccctggtcttaaactttcgatccctctgcctcaggctcccatgtgcttaggtggtagaaccatcacacctgacttgctttttattttaaaacacaaaatgcaggtggaacagcatataaaacacaggcgctctaaataatcactgcaaagaactcattgaagagaatttctggtctctgcaagctgtatgtgcctcctccatggaattcctccctgctcttaaatagtagccacactgaatcgagtgctgccagcactgtctccattaaaggagcagagcctggtaccctaaccgcgcttgccacgtgctccctaagcggacaggctacaggctaattactgactctgatgagttcttcaatgttcttccacccagggcagatgcgtcttggtaatcacagtgctcctcatctgggctgagactttgcttctgtgttagccgtggcggatttagatgttgctaataagctcatcctgcccgaaagagcactttcaatgcagtgcattcatgttatttgggctacacctgctagtgtagaatgtgcattcagaaaagggaagacggtttttgaaattttggagcaaagcatcactctgattgccagtcatgaaggttatgtcttacaggaagacggaacatgcacagactgcgctgggggaggaaagagagcggggaatatagatagtttgggggatgcaaagagattgagcttgttaattccaacgattatcggagtttctgcaacaaaatcagtgactgaggagtagttatggaacccaaatgaaccactcacctgccccgtgctccaaatgttagacagagggagggaggtggcaaggaagttccagtttggagaacatatgcaataatcatttatcactaaacgttttacttgggaggatggcaatacggatgtgaggtgtggggtgggctctggggagggtggtttctggaagagtggagcagcagggtggatggtgcttagttctgtgaaagccgggggggggggggggggggggggagacaactgggcatgaagaaggatgcgctggttctgagttcaagggagtgtggggatgtctctttgaattttgtgttttctttctttctcttcctttatttttttcctggtttactatagagcatctttctttgctttcaattacatctcttgttgtctgtgggagtttactggctttcttttcttttctttttatttatttatttatttttttgttttgagaaagtttttttgtgggtttgaaatgacattctagctgccattggaaagacaacagtgtcctaagctttatggtgtcagagctctgaggagaaaggaaaagcaggcgactgggaggaacggaagcttcctcttctgagctgcagtgaggccagccagggctgagtcatccttaaaaagtgaagatccgctcagcaaatgaccagatcccatcggaggaggccccaggaaaccccagggagagtcattagaacggtttctcccccagcctctgagttccctatggactgtcagctctcagagcatgcaaaactgtgcaaaactctctctctctctctctctctctctctctctctctctctctctctctctctctctttctccctccccccacctccttcgtcctcttctcccctctccctccccttcccctcctgcgcaagcaagagagagagagaaagagagagagagagcttagttttcacccagtttcatcctctgtgaaaacaagtgaagtctgtgcttggaaccatgcatagaacctgctattttcattgtatatacgctgtgttctgtaccataattgttgaacaaatgtgtctgagtttagtgatgggatgctttccttccatacacaaggctctaggttcaggccctggtgccaaaaagcaaaaagcctcaaactggcaaatataaacctttctaagagtaaggaatcaccacaagtagagccatttgtgaggagagtcctgggtcagagagggctatctccccttccccatagagctcctagaaagcaagagaatgtccagacagtaagatgatgtacagtccttctcgtaactaatttatccccagaaattccagaaatactaggaatgaaacgaaaactagtttgattcctgtgttctgagacctttttaatgattccttataacatgagagagtaatgttttgtgaattattctgccgggctgggtatgcagctccctcctctgtgacttaaacagtcttctttatctttattccaccttgctaaagagagcatagcacttcccctgtggcgtgcactccaggctaccagcagatcttttgtcttttcctcccattgtgatgtagaactcctggaatttgaggcgagggttagctttttaggttcctcagttggaactctgatcctcaggctcttgtggcaaaaaaatgctgtctgctgacccatattgttggctctatcatgaatttctttttaactaccattatagagaataatttagtgtcgtgccaatgtttcattgtgtatttgcaaatgaggcattttacaaaataaaggtaaaatgtgtgttttattcttttacttcttccatcaaatagtttatttcttaaggagtaaagaaaattgatacattatatacatatatgtcatatacacccacacatacatcatctacatcatatacatatataaatacatcatatacacatatagcctacacatatactatatatacacacatacacatttatatcacacacatatttagatgtatatcatcgcttctgtttttgtccacaaaatattttcctcaggagcatagcactacatcgccattgcttcatagtaatgcattgccatgctgagtgtctcctttctcgtagtcactggagttgccatccaaagggaaggaaagcagtgtgtctaccttttaatgagttgtgctgcatccagattcttctgagttctctttgatgaattgactggatatttttagtgatctgttaggatacttttcattcttttctcccccccttagccttaggtgtgaggaattatttaaaactggcatcattcaaccccaggaaacggagaacacttgaaagctgtgttttaatgcttgccaggaatgattgaatccgtgtgttgcaatttcaatgtttgttagtgttgtgtttgtttgtgaggtggcaagggtcttgggttcagtaagcaggtagaagtattctgtgtgtcgtagataccacgttgtgtagcaaaaagagcacctggatacctggatgattggaacgcgttgccccaaagagcccccactgtcacgctgccttcaaggcaatgccaggatatgatgcagaactggggcatccgtgcaggttgctggaatatagcatggacacattcaggcatggggtttatggtagtcttggtgacggaggacccaggaactgaacacaatgaataaataggcacggggactttgggctgttatttattttagttaaatcccaacacttctgccactcagaaatattatggactaagaaacttagtccccatcgaatggaaaagtcctattcttagtggggccttctcaggtgggacggtaagctgttactttgtgcaggtcctttggtggggactagggaatcattcctgggtagcataattgtctgggtgaaaattgaagactcttcctttctacctttttctgtccccctcctttctatatctctgtccctcctcccatctgtctctccctccatccccccagccttcccaccctttctcctcccatccttccctctcttcccaccctctctccctccctttccaagatcttactccttaggtagcctgacctcaaattcttcttcagcctccctgaatgctgagtacaggtgtcagccactatgctaatctcctacagaggcatagcttagagcccctgaatcatagaaacagtgaaagcaagtcttgcttttatttttttaaaatatatttcatataggttacccatatagatgtcatttcaaagcacagtcggccatgcatatccacagcttctttatcagtggatataattaaccagagatgagaaacaattagaaaaacaaaacacaaaacaaaaccaatcagccagccaccaagaacaacaacaaaaataaccctaattgcaccattctgtaaacagtacaacgtgtctgctatttacatagcatttacattgtattcagtatcatgaataagctactgatgacttaactgaattgtagaggaggatgagcacagactatatgcaagcattgcatcattctaagtccaggacctgaaccactttgggattgtggtaacctggaaggatggtgtagacctgacctggcctttctccccatagaccatgggatccctgtcgactcgaaactgtgtactgtcaccacagtctattctaggacctaatctttacttccagagaaacttgaaaccctctgtccatctgatcaacatactccctcaggctcaatgacttgaagatctgccttctcttcctatagctttactattctggctgtttcgaatggatgggatcacatggtatatggctttttttggctgtatttttcatttaacattatatttacaaggtttgcccattttgtagtttgggttggtatttcctttcttgatagataataattcattttatgtatagataccattttatttgtctctattgactgatggttgttggagtaattttcacttttttggctattattaataatcttgctgtaaacatttgattatggctttttgtatagctgtactttttatttctcataagcattttatctagactacaataactaaatccaaaaatatctaagtccaaaaatatctcttatttgctcttcttttcaattccttctctctagctctccgtatcctcctgtttctttaccatgttatggaataccatgcctgcgttcttctgtggcctctcttcaagtttagagaagattgacagggttttacacagtagctcttttctggcagattcattaaaaatcccacatgtttatgtttattatattttcatgttcagaatctaatatagctctttggtgctgagatgatattgtcttctatattgcgttgtttatggaatgattcatttaggggttatttttgtttttatttggttttctagttattcctcatctctggttatatccactaatatagaagtcatgggtactgaggactggctgtgctttgggttggcccactttaaataataacctagaggaaattcttctgtgtttttaaataacatttctcaagtaaagagttataaatcatacattttgttagactttacgttttacaataatgaaagttacccgaaagaaaaacatgactaccatagcccaggaacgctgtaataggaggtgcctcttgccccagatgaagctttacattccgagccccgaatccctgagcaaccgttagttcctatattcctcccagaacatgctaatacattaaatgtatttatagccatatgtgttctaagtgttatccctagtgtcgttccatacattaatatgcttatagcatcgcctgtccctctgcttgtaactgacattacataatgatttaactagtttctgcgttttctgtttgctgtggcagtcaggaatctcatttaaaatttctaggagccctgagctcattgtagttgcctgctgaatgaagccttgactttcttaaaattttctccccttttcttaactatttctttaaaaaaaagaatacttgaaagtttcttttccttgtgtgaactttgtttaaacagtttcagtgtgtaggaggattgaacatgcagctagaagaggcgcgcttgacctgatgcagtggacagtgttctgtgcctatataattttagcatctgggacatcacagagcagagcagtacttaagaagttacccctttaatgagtatttaggactgaaatactccaaagggtaaatgtaacttaccaacttgcaaaagatatttttcagaaagtgttattagaaaagaataattatctagttggaacattttagatatttctatatcacggaaactgtacttacgggtagtgccttttatgtctttaggataagtgcttatgaatttgcagtccttgcttgtgtaatcacactggattgttctttggtatgatattgaaatagaaaatacccccactgccattctttcagactacagtgctgtgctttgaatgtggtaaatatcaattgtagtactttaagaattgcttatctgtagaccctagatgctttctttacatgtgagttcccaggtgggaaatcacttgactttttgcttacgagtgagagaaaccatttcgccgaggcctgtcttgccagggtgggtcactggagcacatactgcatctttgtttcagagacttcggctctagcatacaaagtttacttaatggcgctttggctaccattcatgtttgaagttgactttggatgttacaatgcacttaattagaaatttcctttaatgagggaatggaatgtattgagttggtactgtttgatggtggtccttctagaaggcagctaagtgaactggctgtcatggtgcttttgagtggctctagtgataggcgtccagggttaggagtctgaactaatattgttcttaaattctacaactgttagggtcttgtgaacccatgaggacacagtgtttgtaacattcatgcatgttgtcttttacagtcaatccgctcaaacagcttcttttttttttaaagttttatttatttattgtttatatgagtacactgttactgtctacaccagaagagagcatcagattccattatagatggttgtaaaccaccatgtggttgctgggaattgaactcgggacctctggaagagcagtcactgctcttaagcactgagccatctctccagccttcaaacagcttcttttcctattacctcgacactgcccttttgcattggccatagtacatggtattccagcgtctgcttcaagcatagccttgatatttttaggatctgtcagaaagctgttagttttctcttgtggattttcagttcacttctctttactgtgctagacagaaatcttcccctcggttttcctcctctgtgggccgatcacgtgcttaggattgcattggcacacttggccatttctttccttttttcactgtcttctttcttcccttttgcttgagactttccagatgtgtttcctaaaatgtctcttcactttctgctttccctggcccatgtgtatctaataagtgatgagttgtttctttatctctctccctgctctaagccattatgtctgactgcttcctcgatatagaagttgataattccatctgtcagacctgtaaaacccccaagtatgcctctcactggattcccttgtttggttaatcttgcctagttaacccaagcagacatttacctatcactgaacacaattgttattgttgttcttgcttctccttctccttctccttctccttctccttctccttctccttctccttcttcttcttctcttcttcttccccttctcccttccttcttccttctttcttcttccttctcctcctcctcttccttctcctcctcctccttcaccttctccctcctcttcattttccttttcctcctcttcctccttcttcctctacctcttctcccttctccttactcctcttcctcttcttcagtattcttgaattctcaagctatgcaaacacagtgataagtgcagcattagagccatctgccaatattgctattagactttcaatgtagaacttacaagcattaactgagctttaaagaaatcaaagcaaactgtgtagggaagatgtctgtaggcaattctgaagactatgttggacacgggaatagagattactatgtgtggggcttgctaaaagagtgagagaggcttcaccatgtacctaaaacaatgcagaaagcgttgggatttggaaaatgtgatctggagcaataggtaatctggattgtgaaaagccaggtgtcatggagcagccttgtaatcttagcacattaaaggcaaggacaagcgggtgcttggagctgctgctggcctgacctctgagcttagtcatcaaatcccatgtctctgactcaaaagaccaggttcatatttcccaggagcaacacccaagtttgacctccgtcttctacatatataagtgtgaacacatgcacttgcatctgcacgcatatacccatatagaacatgtgtgtgctcacacacacacacacacacacacactctctctctctctctctctctctcacagaaagaggagacttaaaaatggcttatgagcaaagtatttaaatagagaaaaagagaaactaagctattaataatttcaaatagcagaagggttgtcttttggaaatgtttgtcttgtactagaagaagctaaaatacatcacagacaagatgagtttcagaccctaatgataagaagacattttttcatttggtgtacagagactgagacttgattgcatatcacattgatgataatatagaaggtagaaagtacttcttaaaaatattatgggtaggattggattataataaaaaaatctgattagagcactgctacattccagtccagccctgctgtgtcgagggtgtcccttagaatgatactgaagagcttcctagcctttgcacttttacctatagcttggaagtatttgtgaagctatgcagcacaggagagatggctcagtggttaagaacactgactgctgctcttccagagacatgggttcgattcttagcaccacctggccactcacaactccagtctcagaggattggatgctgctttctggcctcagtgggcactaggcacacatatgatacacaaatgcacatacagggaaaacactcttatacataaaatgaaaataaaaacaaagaatatataaatactctaatagtcatcacagtaaaatatctccatttctctgctaagaatattaaaataatttttaaagaattgctagaaaaacatatatttggttttagtatcctataaactaaatcctataatgcacagattctaggtaggaggcatatagtcagttttatttatttgttcaaaggctagtcttctgaaaattgctatataaatacttattttaacaactgttattattaaggggattgtatgaaagtctgccaacatgatcctaatatttatgtagtagatcaaaatattttgaaaattttgctctcaactgtgatctttgttgttttaaaaatccaaaatatccttgttattttcagttaactgcagctggaatagtttttatcgccaatctttggtttcttttttgcttttaattaaaaaaaaaaacagaaattattatgcaaagaataactatctcatgttagtgatttaagtgaaaggaagagttgggggattgagattgggggcatttcagtcaataaaacaataaaactgatacttatgtgcaaattaacagtcaggacaccaacttgttataaccagtgacctcattataattatttcctaactctagagtaattatagattcatgcttgtatatgaagtgatagcaagcgactttcagagtctgtgtttgtcgtacacaatcaggaaatttaatagtcatctattgaggaaaaaaaacacagatgagctgaataatatctccatgaataaggaaattaatttgtgattggttgatgctgtgcttttaggtttacagacattttcttgctgagtggtcttgactgaggcaatgcaggtgtttacatgaatataaaattggcaactatatttaactctaatttaatgtactgtgataggcaaagcctgtttgtctctgccttggacttatttgaagttaatgacatctcagaggagattgtagatagaatgttcctttttagaaacaaaaccccaagtgtgtgtgtggtaggggcccatggtgatattctttgttatggtctctgtacttgttatcgaatttgattttgttataaagctctggcagggatggacatgtagttcagctgtaggtcaaggttttagtacccatggcactgacaccctgtgcctcacccaggctggctccacatccaacatactccaggctcatcttccaaggcactgtgatgattggtacggtgattgttgtctcgtcctgccaggcttcttattctgggcaactttctttaaactttatgttactcatacaagcacccaggaccgtggtccaggaaatcttacaggaatgaagttaatgtgttccgtggattcacagagatacgctggttgtagtcatccctgagttgtcttggttaatatttcagctcttccaacagtttcctttcagctttgggctcacctgacatcatctccatcgtcctctttgctgtgaatctcttgttcatcttccccttattgccaaggctaagtgggtacattgtgaggaagtttgaacagcacacatatggctcctttccaactatctactgtagctgcagtcagctaagagagattgaatgtctagtctgccctcgactccactcttctctcaaaatagcctccataacttccaattttcatatcctattaattaggaaaaagagaaaaactgtcacagggtccctgggagttttgtctccggctaatcagtacttgtttccttcagagtaaagtgcagttattctttatcttgagggagaagatgtcagtcttggttaccgtgtattatcttttactgggtgtagttattatccctatgacagagccgtgtaaatgctctaaaatactttattttaatctgcctttgtttttggtcttgagtcctaatcgaattattccccatcccctttgggtgttcagacagcctttacatttttctatggagtcttacagaccctagaacccgttcatttcacctgattggattgtttcaggaaaaatgataggagatagtcctggaaaactgcttcattcatagaagtaaattgcagttaaaaaaaaaaaaaaaaaacctaaactaaaaggaagtgtggaacaaggcatttcttgagagggtgagacaggaggatagcaagtttgaagccaacctggttccatggtgaatccatttctaaagaaacatcaaaagcaccaacagttacactgaccgagtcctgtgtaattaacctgttcagtttccaaagggcatggtgaatccagtccctgacctgtgagaatgctgcccatttagcattattagaagacagtggagggccttgggaaatgaagttctgattttgatttaccataaagcaagtagaaagggtgcaggttgggagaaataagaacatatttttgaggagactacaaatacagaaaaccaaaacatgaaatattgcttatgactgaatgggaataagtatcatgttcttcactgagggtaggctcaactggatcattctcatgagaatttgtaactctccatctcttttccttgtaaatgattgaattattaaaattttgtattaatcttgctaaattagcttgagcctgggtgctattacattcttccatgcaatcttaaaaatcatagtctggctatatcatgagtctctgtcaattgtaactgggtatatttgtagattagttggctatttttatcatcctgaaaaggataccataatattttgtcagatgtgtcaaaggagcagtgacatacaaatgcctaaaggcgtgtgtccacactggtttaacccagcctatgtgtgctaacagcaaagtcctgtgtaaccatatagaaaaccaagcactcataaaacttcctaattctcaccatctcatgccttttgggaagcaattctaaaattcatattggatgctcccttcaactggttccaatagctgtcgttatggtcatatgatcagaggtgcaaaatagtgtcacctgtgggttcaaaactcatctaaacgggagttttggaatggcaaaacaagtgtctggtgtgcatggtctcatttcactgattaagaattaagaagccggtctgcctggaacagccggcagagacaggagcctagcatagcagccctctgagaggttctacccagcagctgactgagacagacactcacagacaaacattggatagaggtcagggactcctgtaaaacagtaaaaggaaggatggacaagcgtcaaggggatggcatttccacaggaaaaccaacagtgacaactaacctggacccctgggggctcccagacactgaaccaccaaccaaagagcatacgcaggctggcccaagccccagacacttatgtagtatagggctgccttgtctggcctcagtgggagaggatgcacctagtcctgctgtgacttgatgcaccaaggtggggagatgagaggggagctgccttctcagagtagaaaggggtgggggggggagtggagctgggaagaagcagggaggaagggccagagcagggcaacctttgtgatgaaaacaaataggcaaatgataacgtggccttacttaggtttgcaaatcatccatcatttaatcacaacccaaggaatcatgacaactacgaaatgtaacctatttttatttttggttatttattcttagatggttaactcatataattaacctggcagtgtgtttttacagtttttactttttctatgaagctgtatttcctaattcttaacttaccagggaagttgactttatcctcattaagtagtgataatgaatttaaatccagctgacagaattttctaaaactctgggaatatgtccatgccagtgattcatttggattcctgttcccaaggaattttaatttttgaagctgctataaaattatttttgtcggtcctaactacaatccatattttttacatatttactaaaatggaatcacatttaaaaaaatatagtcctagaaattgcattgagtcaggcttggtggcgcacgcctttaatcccagcacttgggaggcagaggcagaggcaggtggatttctgagttcgaggccagcctggtctacaaagtgagttccaggacagccagggctacacaaaggaaccctgtctcaaaaaaaaaaaaaaaaaaaaaaaccgaaaaacaaaaaacaacccccccaccccccaaaaaaaagaaattgcattgaacttagttataaattactttggattgaatgtgtttttgtattggcttcaaagtccatttctttgattttaaaaattgttgttatcatcatcctcatcgtcaccaccaccatcatcaccatcaccatcattgtgcatgtgtgggtgggtatgagtaccacagtatgcatgtcagagtataaattgtaaagtaggatctttcattctgccaatctgtgtattccagagattgaactcccccgtgggtgtcaagtacctttgcccactgagctttctcacagacccctatttctttgttctccttgggcttttctggaagagaatagaaaaaacagaaacatttagatcaatagtggaaatatgatccacattaccaaatgctgtttataagtgttattggggggctggagagatggctcagtggttaagagcactgactgctcttctggaggtcctgagttcaaatcccagcaaccacatggtggctcacaaccatctgtaacaaggcctgattctctcttctggtgtctgaagacagctagtgtacttaaatataataaataaaaattttaaaaaagggttattgattagctggtccagtatagatggccaaagttcaacccagcaacacccccttcaaacaaacaaacaaacaaacaaacaaaagcaagggaggaaaagccacgttggtgagggattaggcttgctcctggcaatggcagacagtaacgttggctattagcgaaggcaatagagagaaaaccaacaactctttaaagaaatttgtgtcaaaatgggattcagtggcccatcacattaaatcaacacatctgtattgagaacgttgtttagcacacactccaggggttcatttttctcattttctgtacttgcaaaccctgtatttatctccagcatgggtcactgaacaaattctggttttcctcattaggtacagagtaatgaggccttaagtctcctgttctatttcaccttctacccaactttgtctgacatgtacctccaccgctcaatgagagacttcaatgtgagcgccgtgctactttgttccttcccagcttttctgcctttgttgattcccgtgcgtggtgcgtgggttcctgcccaggcagtccactgtgcactggtggtctcaggatgctgaggagctggggagttcagtggtgggcagcaggctccctgagagctgtccagggtatgggcagcgctctaccttcccttttttggcttgagaacccacacaagtgacatgttccctccgagtgtgatggatctgtcttccttgtgcctagggccccggatagtttaatttaaaatattttaaatcatgtgatggttaattttcttctggttttgtgtctcagctcactgagatgttcctgattttctttggctatctgctatttgaacagggaagtatttagaatcctaagtcagaggaattacagtttttctattcttttttttttaaagggatttttttttaaaggaagctgctcgaaaatacaccatactaaccagatacaagcctcctgctctcccttgagactcctctcgactctcacagtgctcctttatcccctgtcataataagactccaaaagtattatgttttcttataaagaaaacttctcacgtataaagattcaaaccagcaaaacaaatgtaccagagggtgatttttaatttgacaaaagatcttctacatgacaaagagttcccccgaagattacgtttaagtagacaatttccttcgagtgctgagagtcacattaaacagttgtcaacattttaaaaacaagcacagacctgttcctaatagttatatgtaaatggtgactgtgtgtccccatgttatgagtcatgatacagtctgtgaaatactcaccatcgccagtgttgaaaaaataagcaagatggctattccagtttgcatctctgttgtgagaagacatcaagttgatcaacaggaacttgtggatgagatggggtgtggctaggtcaccttacacttccctggtccagtccttgggaatcctaggtgggaaggaattttagggcagacatctggaattaggaattgaagcagggttcaaggggagagagctacttgctggcttgctttctcagactttctcagcttcttttcttcgatggtgtaagcccacccacagtgttctgagccaccatgcccaatttaagtaggttttaagtacatgtatttaactggattcttaaagcttatggaatttatagtagccattaccttgacttgtgaatatgtttgttatttatgagatcttggagtgagtcgtttttcatatactttcataactcagaacataatatctcccagaaccatacttgggctatggaagctgcctaaagaagagatggtatatattgtagccattgaatttccatagaccatactgtttgtttgtggcaattagtacttactacgtagcacactctggcctactgcttccctctgctctttcactgtagctcagcacagctctccacagtttgcagtattattgaatactaacttcataggtaaatgattagaacatagacagtttttctcttctctgaggtcatagtcacagtgttgccttgagatttgccatgttggtatcaactcatttttgttgcccttgtccacttcatttgtacagctcctcacctccagcccttcccgaaccttccatttatgtcagggaaacctaccaacccactcattatttttcaattagagtcagccctcatctggttagaaagttgaccggagacaggatggagagcccccaatgggaaacatgcacggttttgcgataaactctttttctcttaatgttaaaatttaactttgcagtatttcctcagctgtcagcccagtgacaaatcttctacctcctttcacgaaggggcaccacttccttctaaagcctgaagtatgactttaaaaaaaatacagtcagttatgtttctccaatataacatcaagtttgaatggttcctagcaggaagggaatcaatctctctctctctctctctctctctctctctctctctctctctctcgtagaattggggagtaagattggaaaaaccatagtacacttgagttccctcttgaaaatgtaatgctaacctctaggattttctgtttgaggcttgaattagtttattaatttgtaatcttataaatggttgagtcaaccaaaaccatgacttcctcttcaactatagaatcgtgtgtgtgtgtgtgtgtgtgtgtgtgtgtgtttgtgattttaatattctaattccttttctcctggaaaaaaaagcatactttgttgtttgtttagcattcaacagctcacttgatggacagattgatataacttttttttttcttctttcaaggaacatgccttagcttgggtttagagagaaagttaaagcaaaaaataagctggcaacaaccagacttcaggtgaagcaatatgggatactagcacagtgtagaagacagactccagtgaacaactgcagagagaaagtcagagggtgaggctttgtgcagagtgtgggtattgaacttgacctcccaactggataaacattgaatggatagaaaacattgggaaggtgggatgaaagagaagagaatccgccagtggagcaaaagtagaattaattccttccttccttccttccttccttccttccttccttccttccttccttccttccttcctgggaaagttatgaagactgtactattgagagcattgtggggaaacagtgtccggctttacagaaccccaaaaccaagtgctaattctgacctctttcttcctcttttgcagcgtgctgtacatcccatgtacaaactagacaagggctctatcactgagctctattactgagctctgtcactgagctctatcactgagctctatcactgagttctgtcactgagctctgtcactgagctctatcactgagctctgtcactgagttctgtcactgagctctgtcactgagctctatcactgagctctatcactgagctctatcactgagctctatcactgagttctgtcactgagctctatcactgagctctatcactgagctctatcactaagctgtagcttcagcccaggctacatttcctagtttcagattcactagccgtatgtgtctttccaacattgtaagtttaaattaagcaaatgctgagttcctccatcgtagcagccacctttcaagggattagtggctctagttcttgctgtgggaatgtcaataatatagactgttttcttatcgcagcaagacctcctggacagcacactgcccagtttcaataatgttaggtttggatatggagaactgtcaagttggagagctggcataataataaaaaccatagttgaattttaatgctgtcagtaaagatcagctttgctgttctcaccctcttcctcctctgccttctttctccccttcctctctattcttccctcttttccttatctttctacttttaattgctattttgttgttcaaggaccaaacacagtttgccagcaaattgtattttgtatatgtttttaagaatgtcatgcttcatttatgttcatcagtcacgtactagtttcatagtcaaggaactagaggattttgggaaacactttttcattaaagtagattttaaggagaattcagcttagtttatcatgacagccagggcatggaaaataatttgagtctagaaagtacaaaaggaatgatggtataaagtgatcctgttgggatgtgagagagatctgaatcaaatgatgttgtaagtcattaggagaggggctgaagagatgacgcagagattaatgttctgagatgcacagagatgagtcatgcacaggacccaagttcatgtcccagcactattgccaagtgcctcagaactgcctgtagctccagttccacgggagtctgcactcctgaccctcaggacacctgcactcatgtgcacaaatacacactcatatacacacacgcacacacacacacatttatataattaaatctttaaaatttaaagatattttgatacttgtttgaatggaggtgtaattcttgaccatttcaagttgttttaaagtattagaatttgccgggcgtggtggtgcacacctttaatcccagcactcgggaggcagaggcaggcggacttctgagttcgaggccagcctggtctacagagtgatctccaggacagccagggctatacagagaaaccttgtcttgaaaaaccaagaaaaaaaaagtattagaatttacttttcgataccatagcaacagtgtgtatgatcagtagcttctgctccgtagcagccagtcccttgcttgtgtttcctatgtgtgagagagtgttagaatctccccaggaaaaacatcaacagagaaacagtgtgttgctatattaggaatcgcttcactgctgtgataaatattttattagttaatattgcattttaataatttgtaatcagtaataaatgtttatgtagcatgtatttatttttaaaattttgttgctaataatagtcactcctaccaagttgtaaacactctgataaaaatgtgcagagatattaaaaataccacatactaggcttctcaaaataagtttctatactatcttaaaaattcatgaaaatttacgagagccctggcccctgaaacattcaatgtagctactccttgtgtcccatgggattataggaacgtcttggttatcctgtaacaactacatctgttctactttaaatgatgtttttgttgccattagtaagaagttatatatggccccactgaacagccttcatgataaaagtgtttgcttaagtgtcacagggacactcttcacacaaaaatcaagattcaggcaaaggctccaggcttgtaaaaccagattagtgtctgagatgaaatggctgaatattatacttttttttattggtctcatgagaaatactatgtctaagagctggggtaaaataaacagatgaggaatataattcaaatatgaatttagtttagcatctcataattacgaaagtttctggttacttttccaactgtcctaatagaagactgtgcccctatgatttgtaataagaaagttatcttctaagccagtggttctcaacctgtgggtcgcaactcctttcacatgagttgcctaaaatccccaggaacacagatagttacattactattcataatagttgcaaaattcccgttctgaagtagcaatgaaaataattttacggttggagggtcaacacaacatgacaaactatgttaaagggtctcagcattaggaaggttgagagccgctgcccgacacactgatggtcttaaccatcctaacctgttgtcctgtgtgtggagagtctggtgctcacagttagctgagcaagaaagaatcgacaccatggctagaggaaagctggtggctttgggggttgggctgatgagtttggagaggatgacatacctgttgtcaataaattaataattctcacagtcacctttagattgcatgtatgtcttctaaattgatttcatgctttttggtattatatagttcttgtagcatccttaatactgtatagtgagtctactgagtgctagtagactggatcaattagtccagacttggggtttgtatctcaacaggtcatacagataactctagtgatcagtaggggtgaaagttacgctataaatcaaacagtgacatctcaaattcattatatgagtcttaaaagattttgcgaagtagctgtatttcaggacctttcagaaatttgttttttgttttttgtttttgtttttgtttttaaattgagagtgggatgaccactagattcagggtgttgcttttaacggattattttacgccatcatctaattataaagctgaaacatgagctcagtcagattcctgatgtgaacatcgctctcagtaccccttgccctgacagtttcttacgcagaggcaggaatgacacatgtacgaccctctctgtacagcagcaggtggctgctgactatgtcacgggatatttctttcagtacttttgcttttttaatagtaatcttagcacatcaagacaagcagggttcatgatattttccttttttcctaagataactttgatcataaatgggttttcaggtaacctgtctggcaggggtggtggttgtcctagtggcaaaccttgcgtcttccttctttgcaaacaaggtgggactactgagcccctctggagaggtcaagtgatggtttcctggggggtaaccccctccccatccccaccacacacacacacacacacacacacacacacaatgtatagcatacagtatcatgtatctgatgataacagaagtaaagatcactttgaagagagagaagctagaatgatatagttgcctatttagacacagttatcatttaaataagcaggtgttgctggttacagagtaacttttcagaacaaaagggctttgtccttgtggcctttagaaaagtttgccatttgtaaaccctgttctgctgaggccagtttttattgagggctgatttgttagaatggtggaccatctggcacttcaaaacttctgagactttcagggaggggggggggaaagattgtgtgctgtgttattaactgtcaagtaaaatgatgctgccattgtggtatggagagcgacctaaaaggatgaacatggtttacttgggagtgttctagtggacttcattttgtgtgaaaaaaaatattacatgatcaggtaaaaaaatgtttttcaatttaaatcaaggagatttaagataaattttatctctccatgtccatttctacattttttctgagtgatagccattatttctatcatttgattgttccgtttaccatagattattactaaataaagcttttatcatcctcctcccctttgaagatacacatatggcttatttctctctgtgcactatttatttgccagcctatccacttttctgtgttccttaatgcgtgaatctgccatcatttctttacatgtttcctgtccaaatggagcttattgtgaattcctgtgggtagaatttctgtgtcaaaggtcataagcatttaaaattatcctctgtccccagactgggcagtttctagtaatcttcaggaaatggagtggttaccctagttctgccaggcataggcagaactctaaacagcccacaattttctgtgtcatggtctgggttgactgactgtgtttggtagaagaagagtgtggagaagaaacaaagaaccagtgtagagctcaatgcgcagaacacccatagaaaggagtcaggcaaagacacagcatgtcaatcagagggtgggtgcagtagagagagataaacaaagaaaattactgtctctgtctttaggggcgctgtatttgtgcttcctgtggaaagtgtacagactttgatttctttaacctgggcattcccacaaagctgccaaaccttccagagccttcttcttaaagctccatgtcacgtggccacatctgtcctatgcgcttacactgaggcttggctgttaagagcattttacccttgtctgatgctgcattgttttcgggaaggatatattttggggacagtaacttgtctcggtattattttctgaataacctactatagtgctctctgaatccttaactatttagagggccgtggaaagctgacccctgcacctggctggctaattcagaagtggatcagctggcgggcctgcccctgaaccccttccccactctcccagggaagaaaaaaagctctttgtgcttttaccataactgttaaaaccttctggccatgaactatggaaacatctaaagtagtaacttttttttcttatgaatggtgttttttttttttatttcccaacacccacccttatcattatcaaaatagatgtggcatttattaaaggtgaacattataaaataagaccttgtgcacagtcttatgccccggcttcctgggatgaaaggaggtttcacccctttcatcagggggctcaggcctccatctcctggttgaactttctgccctttggggctgtatattaccttaaatagcttgcagctgacagactgcactgccggcccatgtgaactggaacgctgtaatggatggggtagcgtctcctaatggaaccaccgtggtaggcgacaatgagaagaaatctctcctcgggattaggggcttggagcgattttattttattttatactttattttattttagttctgacctccaagttagcaggttatgaagaggagaaatgaggtgatttgcttcacaagaaataaacaagggtcttttcttgagtcagaatgggcttacagcaggcacaatgttcttgcccatgcctgaagctgttcattttgtgaatcggccagccgccatttatctgtggccacctattgacccccgtatgctttgctttacaggctcctaaaatctctttcttttctcagggttctttgtattggccacatcaggagaaatctgttaggttttatgcagaaaaaaaaaacactttatttttacagttttaagacatgtgagcttggtatttagagggaaggaacgcttaagttcactgtaggagaaaatatcagttccccaaagctactctttatgttaaccctagataatctcttgctgcttttataaaattacaagtaagttatcttttagcaagctatacgcaacacagtttttaaatgtagaatattactttatcagcctgctctttggaagttcatggggaagccatacaggccttttcattttgacactggaatgtggttttcattaggtaatttggatttggattttattggttggattttcctgtgcttctccatggttccggggccttccttggctttctcatggaactgtatgcttgaatttgaaacatgtcttacttagctaaagattctgggttgcttaggttgatctatcgtagagaccagcagcttggcatgccttcgcactcctgaggattagtgagccttttatttgcacactggtttaaacggagaaaatgtcaactacttcaaatgccaccatccaatttgttgtctctctggtggctttttaatttcactggaggcttctctaggacttataggatttacagaagataatgtatcaagaaaagcttgctgtacaaaaaagggggagtacatatcacaattcatgaactgaatttaaactgaggaaatgtcatcaccaatagatagaaggcagttcactacatttagattttcgaagtcttacttttaatgcctcatttccaagctcttaatttacatgctggagctgcagctgaatgaccgatcactttcataatgtagataaggccctgagtttgatcatctagaacagataaatgaataagaaaacataacaatacagatttagtgtggtgacagtatgtaattaaagtgaagactacggagattgggactggagaggtggcctggcccttaagtgttcatacagttctcccaggccttggggttcagttcccatccaggtcaggtggcttgcagcctcttgtaattccagtcccagcagatccagtgtgtttcttctcgcctttgcaggtaccggcactctcatgcacatacccatacccatacatacatgtataacaaaaaataaaaatcttaaaaacaagagtgtaaagatgtcttctgaggggactggagagatggctcagcagttaagagcaccgactgctcttctgaaggtcctgagttcaaatcccaacaactgcatggtggctcacaaccatcagtaacgagatctggcaccctcttctagagtgtctgaagacagctacagggcacttacatataataaataaataaatcttaaaaaaaaaaagatgtcttctgaacgactccaccacctttccagtggtttattttgaatatagaccccctagtctatgctggtcacctttgtttactgcaccatcatagctaggctgacccccatctttgacagttttgacaacggtgtgaagaaaattctatctcagtgccctctcttctttgccggcagagggtggcaattctgagaacgggcagcagctttggtatgttctactgcaaagctgctggtcccctccttctttttccttatcctgtacagaatatggacatttaccgcactcagaaatgtgtcttctctggaggagatctgccctaaagaaggatgctgttattatgccttgacctttattcttagggaaggaaacaggatatctcaggcacttctaatagcattgtgctccttagcttggtgtaaaaaccctctaagggtaagagccttcttgtgcttcctattgtctgttgcttggtagagtcttttcagttcactctttagatatgtgcggcctgtttgcacatgtcagctcacagtcctgtagcactctgggtggtagctggaagtttgcccagctgagagagtttgctctttttcttcctcttatttatttatttattttctgggtggtggttggtggtggtggtagctgtggtggtggtttcttttgtcttgaatttatgtaaaaagtttatttgttgctgtttaaagatctcagcatgtggcctgagccctggcagactgggtcaccttggctaaagcaagggctgagaaagagtcccctggatgtgtgaatgtcagtactccagtcttgtccagtctgttttgagccacattgcagactgcttttcctctatattttctgaataatggttggagaaaaatgagagtttctatttatccatcaaaatgtggtgctttggaaatcctacatagccatttttgccccccaggggaatatatagatttctataaataagtaatgaaaatattttaaaagcttgttaaattttgtataaatggacatatgtaaaacacatgctatggaaatactgatgtgaaaataggttgggaatgaagtggaaagagaacaggtttgtagatcagacacctgtaatagtgatggattcctggtagatttgaactcttacatgtgaagatctttttgtataggtttaaatggatgctcacaactttgatactcaggtaattgtgtagaaaactctaatttcagcgtgctcttccacctttgctgttgacctgatgcaaaaaagtagattcagttgcattaagaccctttgtgatgtgtccccattaaaacactgtttatggtaaaaatcctccccgtgactagagaaagatgcttcctatggacagccccaccgttcttaccttttatggctatgctaaatagctatgtaaaacaaaacaaaacaagacaaaacaccctgtgaaatggtaggatgactgatcagtacaaaggtgtagtttgttctgaacttccccctccaaagtcatcccacctgaagtggaaaataagttcggtgtcattggttgtcaaaattggaatattttctttcattttgtccgtatcaaattctccttatgcaaacagaccgggcgactttttaataagatcaaagaactttaagaactatttccctcatcattttgcctttgcagcccgttttattttctttgcactaataatggaattaatgaagcttgtttccttttgtggcatgtggtgtgtggcgcacccactcccctttcttttcctgggtgggctcccaaggggactatggctcctggggtctattcaggactgagacaatgtaaaggatactgtactgaagtttggggcagggcggcctccaggaagtgggaggaagcttcagtcctgctgggtgaggggtggcgggagagggaggatgctgattaaaataataaacaggggcctaggagagagtccgggtgctgtcagatcaggtctgggagtcgcgggagctgctgcaaagctccctctgggcactgcacaccctgtcctgaggagggcatcctgagatttgttgcaagacctttccttccggaccggagcaaagcaacttttaaaagttttaactccgcggcactgacagcgtaccttaggctgtgctgaagtgagcaagcggagtgaaactagcttggtggtcaccatagcaactgtgcttctgctgtctgggagaatggaagctggtggtctcgtgtctcgggttttttggggcgtcttcagctaggagcacactcctgcttactggaactctacataagccctgctgttttaaaattggctcttgactcagactttttttttttttcctgtcttttccttttttctttttgaaggcagcctgaatggaggaagttggtaatgcttggctttttttccctcccttctctcttgcaagtttccaggctatagctttttccccctttcctttctgctgtgtgtaattgagaccaaactctaagcctgggctctgaagagaacagtggtggcctgcaggtctttagggaggccggcagaaagagatcctgggcttcccagggcaaaaaaggagaccatgccagcctcgtggaacacagctacaagaaaacacagaagcaggtctctgcctgccgagctccgaagtccgtgaggaaacggacccaaggtggggtggctaaaatgtcccagcgcaagctgctgatgctcatgggccaccgctcaagggcaaggattgaaaaggattttacgaaggagttgaaagtatagctagtgaagatacgggttttaaaagttggacgttgttgtctgaaggaagtttgccaggaagatgtaggcttcaagggctcccggacgatgattggtctgaacttcagcttacgagaattgttgacaaaatttgaaaaggtatgcagaaagaaaacttcacggacgcacttctgttttagttctgtttcttcttctgtttgtgctctcctctttcttcttcttcttcttcttcttcttcttcttcttcttcttcttcttcttcttcttcttcttcttcttcttcttcttcttcttcttcttcttcttctcctcctcctcctcctcctcctcctcctcctcctccttcttctccttctcctcctcctccattgtttactgtaacttctaaagcattttcatttttaattttaatgtaatagcttctttgagattgtgttttagggaacatagttctttcccttggtcaggaagagttctcatgcttgtcagctttaacgttccacatcagaaggaatggcttagagtcaagtcagctggtaacttaattgcaatttatttggggggagaaaacaaaacaacagccaaatccagcaacaaacactgggtttgggtgccaaaggctgacttcatcaagcgtgtattctgttttccatgcccctcaggtttgtttatctctcaggctgctgcggctgagcctgcccttgcagccccggctgaggattcagctctgagccccagaagctggcccttggtaacgatggcacatctgctgtctggcatttccttcagaatctcttgttttaaaagtggataaggtttaaggcttggattactaactttgcacttggcaccctctcttcccccaaggctcttggcacaccccagggtggagcatagcctgtaaaaaggctacctcctcactttttgaattaaacaaagcagaaacctccccgagccagttagtggcttcctgagtgccagtcttgttccagtttctgctacttaaaggagtggggagagaaagaaaagaaagaggcagggtcctttatccctataggcacagatgaactgtttatcaactgttaaatgtgttctggtttttcccaccattcctgaaagtacaaatataagcatcttgaatcattcaaagaataatagactttttcttaggaattgcaactgccagaggaaaagatgtaaaaagtgataccctttaaaaaggtggtaggcttttcctgaacaattgcagccatcctggcttcccagtgatggaagcagcctatcagaagtatgtataacaacagcaaaaagttagtccctcctcatagagtgcttcctatctcacatcccaacttgagtagtggagaatttgcttgtaacatgggacagacctgttgctttcatagttggtaagggtctgaattctggagagcaagagccagttcacagttggcttgctcacttacaaagggcatgacaaagaaagaatatcgctcttgtggcagctgcgaacagcaggtgacaaactttatggccgtaaagaggtctgttagcttgttttctgcagatttgtctcattcacataaaaaggtatagagcatatgtgacaggaataataattcatgcttgtcatcctcacccccctccaataatcatggtgcaatagctggacttttgaattctaattgctgctatttgtcttcaggcttaggtcagatagctgaggtgagcaacctagtttcttaggcctctgggccatcttgtgggtagagtcagatgttctgacattggtatgctttctcctttaattcccaggccttggtatctgaacatgacttaatcttgtttttactttaggagttgacttgacagcaaaagaaaggcttatatatgtaaaaggcttgatttgaaaattttctccaaggatagatttccaagagaccaccctgcttccattgaatatgaactttatgtatgctcattcttgtggtgggcatgttttcaaagcctggatgaaggtaacacttatatgtgtttcactggtaggaagccatcacccaccagtgtgtatttttccaactcgcaccttaaaaaaaatccctttgtatattctaacaaagctgtctcatatattcagtttatgctccattaagtcattgccaggaaaaccggaattctggaaaggtttcactacttcacacctctcaaattcagctacttccctttctctaacccagaaagcaacgctgccatttctggggacatttgaactatttgtaattggaaagccacgtggggtgctgactgccacttgcaacagtacactcaactcccttttcccgtggcatgcagaagctaccatgttcatttgtggtcttgctttattccaaagactgtagaagctgacctgctatgtgcagtggtagactccctttattccatggaatacaggagctgacctactatgtgcactaggggactccctttactttcagttctcttagtttttcttcctccttctcctcctcccctcctcctcctccttgcctcagacatgccaccattttcataacagcagtttaattgttcaatcagatggtaagttatcacaaccaaatgtcaattttgctttatttttaaagccatttctggcttgaagaaaactaagagtccatcttgggatagtagatgcagatttgatatgtttggtaattgaggtccgtgcttggcaggttacccagtgctgactgatactgagagattgacttgttagatatctaagatcattggatggggtgaaagcaaaccttctgcccgcctttaaggcaccagactgtggagatgaagagaaagccacattattttaaggaaactagtgaaaactttgctcttttcacacatatctgaacatctatcatatgaatgaatatctactcctgggcagattgcaactaggactcgtgtctcttcaaaccaccatgttatgagtccttgggggtccaagaggcaggaagctttcagagatgctcatccaagctcagggaaccattccctcctaagaggaggaccttcttactagaggataaggacctcaccgtgtgatggatccgccaataaggaggtctctcagtatccttaagccacatgcagctatgcccatgaacctgagagtgacttctcagcaagctcaagtttgtagacaaagagatgactcaccagggaacccctgtcaaagcctctggcttagtttcatggttccactcattttaattcaccagcgtttttcttgagcaaactttcctaacgaaagcataacagcgttagtgctgtactgtcttagcagagcctcttgtattgtgtactggttttgtgtctgttgcttagtcctacagagacttgagtaatgggcagctctagctcagtgacattttaaatgactgtcgcttttattaatttttttatagccctgctactagatgattaatgataatggtcatcccaaggggttctgtttttgtttttaatcgacagatgataatcatacatctttatggggtaacatgtgacaatgttgttacatttatatattatgtcatgattaactcaggctctttaagccatccatcatctgaaacatttatcattccattgctctttagacatacaaaatctcctatcacagtttgaaacatatgatagaatatggtcggttgtgttctcctttgagggatccttaccatgtatctggatggcagtgttcacttggtgagtctttaaagaaagagactcttcatagtgacaatatagtcactgactatgtaatgcatctctatggcatttaccccctttatcaagcatgagtctgatattttaaaagctagaagagaagtgagccatggttcataggtgatggtctatcatgttggagaaaatatggctgccatggtggttttgttcccactggtggcaattaggatggtttgctcatagatgtgcaggtacaacaggagaaaaactggattggagagaagtggggccagggtataatattcaagcctgcctgccacttggcaaccacatcctccagctagaccctctctcctacagtcttcataacatttcaaaaacaactccagtaaattttaaatacataagtctatgggggacgtttcacattaaaactgttataacctctgagctatacctccaaccctccaattaaatatttaattcaaattaaatatttaatttaaatgtgggtagatcctggaagagacagtaaattccttcatttactgtttagggaatatttctgaagtaccagttatcaaggttgaatgtagggatgggagacaaccacgtggggcccactctttccttcattgggctattgtagtggtaggatatagaccttaagcgagaagatttacatgataagtgtgcagtttatcctattgtcttagttgggtgggtttttgttgttgttgttttttgcttgttttatgcgaggagacacatgccataaccaaggcaaattttataaaggaaaacatttcattggtgctggcttactgttggaggtttagtccattatcatcatgcctggggaagcacggtgtcatataggcagacatggtgctggagaagaagctgagaattctacatcctcaactcacaggcagcagacttgaacatctgagagctcaaagctcataccctagtgatgaacctctaccaaccaaaccacagctactctaacaaggccacacctcctaatagtgaccctcctgatgtgcctctaggaaccactttctttcaaacaggcttattttgtccagtttcttttagcttaactgagttttgttttaattcagcttacttttgagatggggtattctagagttggtcattgtgttgatcagtttgtaatcaagttcttggtgatcctcctgcctcaacctcccaagtgctgggcagttgcaggaatgagccctcacactcagccaatagcaagtatagtaacagtagaaactggttttataaagtctcctctggagaaattgcattatatctgtgatttcaaaacctagtttaagcttaaggagaaactgaggttgtgttccggtttgcgagctcctgcgcagcatgggtggatttgggtggagggagaaactcactaggatcttcattgacagagcacagcagcaacactgattgggatttgaagagaagcttaccccaggattgtagctttgaatgtttgattagtgtgaaggacaacagtccattggtgtgaggtcagacttaagtttgatcacaatgctggatagaggagttgagttaaaacattatattggccacttgaaaggttaagggagtgttcctagaaacttgtgatgcagatagtctgtgcttatgtagtgtgtgctttgaaaggaaagtcactgtagtgtgatttagtgtggcttaaaactatatggtttagacgttcagagttaaaagcttgaaataattttttttttttttttttggtggtagaagatagttctgtttacagcagtgtttacatgttggcatttaaaaagcagtttatagtttattggaaactggcttgttgaaatcaccttgaaattgtagtaaatggtgatcttaaacttagtaaattgtaaattagtaaatagacttgtcataggttttgtctctttgatataagtgtagacagatgttcctgcgactctcagttgaggagtttcctccatcagattgtcctgtgagcttatctgtgggatatcatctttcttaattgcttattgatgtaggagggcacagcccactgtgggcagcaccatccttatgctgaataagaaagttagccaagcaaaccaggaggaacaaggcagtaagcagcatttctcagtggtctctgcttcagttcctacctccaggattctgtcctgacctccctagtgatagactgtgacctaggagttgtaacatgaaataaatcctttcctgccccacttggttttactcagtgtggtatcaaagcaacacaaagcaaaccaagacaaaagtttttctactccattatcttacatatatttacatcacaaacagtgggagaagagcattaattgctctgatttcttaatttgtaaaagtaaccgtcaatactatcagctttacagtcagaatggcattctaatgttgatcaaaataggactcacagcttgactcaaaatttcaagacaagttattggaaggaaatacagtatttagcacaattaatagggtaactgaaatcaataaataattgagtaacttcttacaagtttcaaatgctgaaaacatacttttgacttgacatttgattatattaactatttatttttatttggaaaaatatctggatttttttcaagttatgaaactcctctttaaaatacaaagctccttgagcatctctttcagtccatcttccctatctcctggatccaacatggctttttaaaggcacaccggatttatttttcatcccacgggttactgtgttcatttagcctaagtttgggacaggctaatggaataattgctcatttcccctctccaccttcaggacaggggtcaacactcctccagaggaaacattgctatagccatatagggttagagaaataagccacgcaaaaaataaagttgagtcaattagtctcaaagagaatgcatggaatctagcagggatttagctgttgaagttggcttgatggtattatgccctattagaatgttcatacagttctgtttgggtaaatctaaagaaacatttttaccttccaagttacattagtagtgttagtaagacatagggaacagagtatatcagggcacagtggcctatatctgtaaatctaacacttgaaatagtccatgggaggatcaggctaggatacatagtgaaatactcactcaaaagcaaaaacataacaacaacacaaacaaattgtgtgtgtatttgtatttctgtgatatctttatttatatcttcattaaaagaatgaccaaatgaggcagatctgctattaagatatcaaatataaagtaagtacaatacagaattaatgtattcctttctttgtgccatttattggacctacatagtgagagctattcacagaaacactactgctaatcagcaaatcagcaaatcttacttagctctggaagccctgttttggagagctgtgatggggtttgcatctcatgctactgatggtgtttcagtaagaggaaaagtagtggccttcttttccagcccttcttctttcttaaccctccccattgtgcttacaccccctacatgcatccttaggacatttaccagccttgttttcaaggtattagttcaactacttgctccagtgtgcacatgactggtttatgttaagagcttggaagagaattgctttgtgcttctagatggattacagtcccttgctaattatcagtaactgtttagtgctatttaaccttctgcagggcttgctgggtgacagaggtaagcattaatagaactacatcttcctggatggccaacaaaaggaacacttcctttatggaactttgatttattttagcatttagtgctgcttgagggtcttgccctcaaagccctccgtgctggcatcttgattttaaaagcttcgcatcattgcacagctatctatcaaggagcatgattcattaacttcatttaattctgagtttccagtgagagcgttgataggactttacagcaccggcttctaaatgatttcacgtttttcatatccaaacttttaagtgaggaaattgaacttaaacatttaccccattgctgttcaatccatcacctgcttcctttgtcactactgtggcttacttgtcaaccagtcaagatgtatgagtatttgtttatgacattggtcttttatgttagacttattttgtataacagaagctgtgaaagatgcagaagaaacataatacaattttcttttttttttttttaattttatttttttgtttgtgtgtttgttttcaattctgggtgattttggaagaatatgtcaccaaaaggcaaataaaacaaaataatgtgtggtgatctctttttctttgttcatgttctgattgttggcgtttcttcctaactgttgatgttgctctcatatggaagggtttctcacatcttgcaggctttattccaactgggacatcactgcagttctctctcagtgccttcagggccaaacatctttactgtctttgctgaattgggaaacatatcacctgccatgattgtgaggagaaatttgcttcacatctgcagtgtccaaacgtatgaagttaggcagtgctcttgtggaccatagcatttctatatcctgttgtacatccgtctttctggtctcgtggatctgaagggtagcaggaaccaggtctaatgtgagaataactttaaaagtcccacactctttacatattcttaaaatttcaatctctttataatatccatctcttttaaatccaaagtctttttacaattaaaagtctcttaactgtgggctccactaaaatagtttcttccttcaagagggaaaatatcagggcacagtcacaatcaaaagcaaaaatcaatctccaaccatccaatgtctgggatccaactcacgatcttctgggctcctccaagggcttgggtcacttttccagccatgccctttgtagcacaggcgtcgtcctctaggtgcctgtactccactgctgctgctgctcttggtggtcatctcatggtactggcatctccaaaacactgcatgacccctttagtcctgggcttgaggttgtgttgtgaatttttggcccattgttcttaagaatctgtgcagagaatataaggccaagttcccttggcaatggaaagcaaagagaggccttgttgattctatcattgagtctcttgagaaatatggtaatgatatagatcaacagcactgcaaaagtagtcttctaagtttcatatacaaatctatacgtatgtaggttatactcaatgatgcttcagattttgattcaagtagctatattttgtggttatacctgcaccctttaaagctggggtcccaaaaaggaaactcaggctgcatcctgttctttgaatagatactataacatgtttttaggatagatactgtaacaagttcttaggatagatactgtaacaagttcttaggatagatactgtaacaagttcttaggatagatactataacatgtttttaggatagatactgtaacaagttcttaggatagataatgtaacaagtttgtttttccgtacattctgcaagtaatttcagtattaactttcacattcctatttaatagaagaaaaattatttttcctttattatttcttagtgaagctaaacatatgtgaatattcttcaaaggttttagaataaattgtatgagattaaaatgacaggcagagggagagtaagtagtgacttacaatagtaataaaaatttaaaaaatgcccactccctctaaaatactaacatcaaacaggatggtgcatgaatgtagaatgttataaattctgcttttaggacactgggaattgatgtattagagatttaaagactattattttcaatgatggaactgtgggaatacttggttttgttttacattactgatggtaaaataaagtcttttgattaaaaacagttcttctgcacatccaaaagtaactgttcatgtaaagatcctgcaacgtgccccaagtgacctttagcatttgcatcatctctttgcttttctatttaggacatccaggcagaaattgatgcccacaatgacatatttaaaagcatcgatggaaaccggcagaagatggtgaaagctctggggaattctgaggaagcaacaatgcttcagcatcgactggatgacatgaaccaaagatggaatgatttgaaggcaaaatctgctagcatcaggtcagaccactcgagatttaaaaaaaaaagtgtgtgtgaatgtgtgtgtgtgtgcgcgcttatgtagatttgggtctatcagaaagagaaaggattagtacaactctatcagaatttgtttaagattgaaatccaaagtctgttttctttccagttggtactgaagatatacttaacagtagaggacttaactgtggattaggtcttgggttcaatcctcagcactaccaaaagaataaatatgtagttagaagtttttgcctcgtttatatacccagtgtgctctactatttgttccaggatattcatagtcatgttttaaaccatacaacaatacggataataatgtcactgacacttgctaattgataagtgtttatcattatattgtatgttttatactgtgttaggatcattagagccctattgatctgtctatctatctatctatctatctatctatctatctatctatctatctatctacctacctaccatccatccatctattaatttatttgagacaaggtagtagtactgggtggcttagaaatcactacatgaccggactgactttaaactcagagttatctgctcacctttgccactcaagtgcaggaaataaagacattcatttttcacagagcaggcgtgctatagcccaggttgaccttgagtttattgtgtaggcaaggttggcctttaatgctttgttagaaacaaaaacaaaaacaaaaacaaaacccttcatttaaattatgtacatgtatataacttttgtaaatgtatgtacaccatgtgtgtagcagcccatggaagtggaagaggacatcgaatcccctagaactggagagctgccatgtagatattgggaaccagcctggctcctctgcaagagcactaggtgctcctaacttgtgaactatctttctcaggccctggcctttgactttttcattcttcatccagagtgtgctgacattacatacaagtcccatcctgcccatttagaacaattactttacttagtagtcttgcactgtgtactaacttatccatcactttatgtacagtagttgtttcacacaactacttaatttatactatagagatctgatggcttctcagaacgtgcctctgttgttaagtggcacatgatagttcttgaaaaaaaatccctgtaaagtagaaggtcaggatttccatatgagaagtttaatgaatataaagattaagataataagataatagccagaatttgaatgtagatttctttaaatcttggtattgaatctattttgccccatcaagtgtttatgtccactttgaaaatatatttatttattgagattaattgcctcttataaacactaaaatgtagaagtgatgattcagttctgctttggatgaaagtaaaattcagttaagtacggacaataggatcagggctctgacaaggaaacagcattaacgaattacccagagtaacagactggtaccattattggacttcaagcacattttaagttcatactcagtagctgatagacagtttctaattggcagcaagttaaagggatacttacagaagaccatagtagcaagaatgataattccaaagaggaatgttggttaaagccttagatttggttgtatcatgtgttgaatatgcataaccttaaaaccaaatggtaccgactttgatttttgcactttgctatgtattttctgaagttggacacattactttacccctgtgaactttgccaaggtgtactatctgtatccaacacacttgattgtcaggaagaccaactagaatgatttgattttttctcaggctctgtagaccctggttaaagtagactctaggctattactcatacacaaggttgggtgagtggatcggattcagcaggtgttgggaatccatagagcggctgccagagaatggaaatcatccactattttttgtcctgtatgattttcttattaataaagaaaagtaccatgtgctctactgggtctcataaattaaaacttacaacccctctatttcttaggaagagtgaattgtggcgctatgcactcttctccctatagctccagttggaaattatctctgcatcagccacctctcctgttcatttgtgctagagatggaagcccaagctttgcttatgctgtgtagatactatctatgtttatgtccatatggactcacttgtgttttctatgattagatatgtgtaactaaagaggaaagaacttttcatattttaatcttcaaatatgtaaaaagatgaaatcacgtatcctttatgaatttgtatgagatagtggtttatctttctcagtagtgggctcttcacataggaagttcagcttagaaagaaggggaacaaagcagctttggagagcattgcgctttgcagagacactatgtccaaacactggtgttgtcatgcagcagtcagtgggcaggttattgacccatgtgtgtgcttcagtttccttgtatgtgaagcaagagtaatttccttagtggggcttccatgcatgttttagttagcccacatacaatacatgcaagaagtgggtcatgtttattactgctatcagccactacttgtgtggtaaattcctctcctccccagcccctcccatatcttagtcatgagtgtaggaactgtttgagggactcaccagtaagcagtgccctctttcctggctggattctgaacaaatgtgaaagaaaagtgggtttagccggcttcctcacaaaatctaatgccatgggaatgacggacagaagccaggtgaaaggaggaactggcttagagcttaggttgctaactcaaacctagactgatgcagaattcccagtagtcactactcaaaggtggcttcccaagtgagacaccctacatgcaaggtctattattttacagcaaaattcttccctgggccagtctctttctggctccgcctccttcattatacacgcaaatgatgtgggtggagttgctgttcagatcactcctccctttcttctctggctttaggagtccagcctggtactcacattgcctttaggagtccagcctggttctcacattgccttctgttggtatccgattatcactcttccctgtaattaattgaaaattgacttttctcttaattgccaaactttacttgaaatgttctttaatagaggttaatttcctccattttccttgcctagaagccagtgggaatactctgaatattaagcctcctgtggacaccacgcattaggatatcagtcataaactggccgtggaaggcagtttgcctgcagaagtagccctgtcacatagggataggtggccaattggcagcctcttgtggctcctcctgccttgattcccatctcttcacatctcccccccccctttttttttttaaaacaatgcatctatatttctgcccctttatcatcttactcctaatctataggggcatatggttcctttctctttgaagtacacacactacttccttttatcttccgccctcagctctcagccttggtggaaacattcacactggtaactttttcttccccgacacagactttctctgtgtagtcatgactgttctggaacttgctctctataccaggctggccttgaactcagagagttgcctgtatctgcctctctagagctgcgattaaaggtatatactatcacccagcaataacatttttgtattttaatcttcaagtctctctttgcactgtctgtgaacgttctcagctcatttctattcttaagtcccatagacctgctcatcctgggcttccattgatttcatcttcatcttggcctccttgagatcacccagtccccaggggaccatgggcagggtgatctccagagggattcaggtgcattccactggacacgtgaattcctcagagatgggccttggttaaaccaaatcaaacttaggcattattaatgaaaccctctcatatgaaagtgatggaccttctccagctagggcccctttcctccttagctggagccatctgtgtactattctataactgtgttatttacttcatacaatttatttataatgaagctacattactctagccacctgcactatatttaaaaatgtagatcctccaacattttctttttattcattgatttaacatttttcacacaattttgatcatattccgtcctctccctcaggtcctctcaggccaccccagccttgttccagccttttccatgatggactgcttcatttctgtcttagtttggttttccagtgctgtaataaaagcaatttggggagggaaggctttatctccctcacacttcaacgtcacagtctttcagggtaggaactgagcagagactgctagggagccttgctctctggcctcttccgtggcttgtgcagctttcctatacaactctggaccacaagggtgacctcacccaccgtgagctgggcctttctacatcagtcattaatcaagacagtactccacagatttgcctacaggccagtgtgatagaggcattttctcaaccccttccatccagcttggagctcttcataacacattctagtcagagccatgcccttgtattgtcccccaaaccccagttgagctttctcttctacttctattcacattgatatatcctggtcaccaccttctctctatcccctactattaatcttggattaattgccccctccttccctccctccttccttccctttctgtgtatgtgtgtgctcatgaccatgtgtctcttaagatgcttctgcatgtagacacacaaacatggagagattaaagatgtgtattttcctttccacttttaaaaacaatttttgtttttgttgttgttgttgttaattttgaggcaggttctctcattgaacctggagccaggaagccccagggatttttcctgtttccacatctccagggttacaagtgccaccttttatgtggaagctgggaatctgaacatagaggctcatgcttgtatcccaagcattttaccaactgaaccatctccccagatgtgtggtgctttaggaaggggggtggcaggcagaagctaaggtttctttgatataatttgatactgcctactattgctgttataattctgaatatttttctattttattcactgccatgtctatcttcaaaggccttgttttctcttcagtttccaagcctttctttctctggatgacttaatcattttctgaggatgaggccatttgattgataacaccctgccccttcaattccataatatttgtggattgtgtatttcaaatagtgtttagttcatactaccaccatggggaaatgtttcttttaatttgtttttaggaagtggatgtatgctctttattgttttgttttgataatctactcttaaatatttatggacatcacctactttaaccatgctgtggtcattggaacagctacctgaactattactttaaagatttttggatgaccatgattgagccctttaaatattaaaattcagtgtgctaaatatgctgtatcatcttaaatacaatccataacattataatatatacttgtatatattatataatgttgcatagcattatatataattatatataacattgattttatacacacacacacacacacacacacacacacacacacacacacacacatacacacgccagtacacaatggagtatcaggtcagtatataacaaattagctgaagacttaagatttcatttataaaagaggctcttaggagtgctggcagtactttatgatcacttttaaaactgattggaattatactaataaattcaagactgaatgccatggcttacatttttaaattaaatttatttaatgtaagattatgttaattaaatatccacttatcggcttaatgatgtttaatatagatccatcctaacactgggtttcaaaggctgggcaagttgtcaaatgtgacagaaacagagtttaaagataaaaatctatcttgcatttcttttataagtctttttaacatttgggtcattgttctccaagcccttatgggcgatggctattcactgtcatccttggtgttgtcacattttacagcaccattcttaaccttaagggcttgtttttgctaactacattacaaagctaaagtctccttctcctaaatgtaacaaaacaagattctattctcctcttagaacgttctccagcagggctctctgtggtggcaggaaggagccctgtcaatctggttacaccatgcccggttagctacaagtggcattttgaactcttaaattatggctagtgtgactgaggagctgagtttaagtcctagttatctgaagatgtgtgtttccatagctgcacatcacaggtgtccgccatatccagtcatagctctggggtgctctttagtggctgaattttaaggactgtctgttttatttggttggccttccatgctcattttgggagcaggaataatctcttttgaatgttgtcaccttacatgtacattcttagttacatttgttgttggtttttttttttcattgttacacaatttaaattaagtgagtttcacaatatctgaaaagagatcacacttgtacttgaatgacagatttcatctgtgtagttttctctgctctgggaggtagcatgtctctgtctttgttgtcttttcactgagatccttacaaagcttaggagactgagtttgcgaaagtgcttttgacttgtgtaccatttagttgagcagtttatagttttcctccttttgctgttgctaaccaaagccgtggttggctgaagtccacatcttcctagtgctgcctgaggcctttggctccctcagtgtcccgatatttagcagagtggccatcagccttcccatcttgggagtgtatttggtgaacttgaaatttttccaatttgaccttcaaatattaacattttgccttttgttttagaagtcttgttgtacctaagggtgctccttgaacactggttcgtactgatgattgagaactgttttccttcctgcctctctccctctcactcccccttaccctcccacaccttttcttccccattttcttccttggacagcgtctcatgcatcacaggctggcttggaagccgctgtggagaatgatcttgcactgttgattctcctgcctctacctcctgaatgccgaggttacaggagggcaccacctcacctggtttatgagatgctggggaaccaaaccaggatatgtgcatgctaaacaaacactctaccaactgacttctggctctggtccccaaatgggtatcttttagcttacacgattttctttgttgataattatattctggagaggagtcagataatttgtttgatgacagttactttgaaaaatcactttggtgattcaaaacagatatgagtgtacatttcactctgtagttcttttcttaccatagccaattggtaaggaaagcttttaataaatgtttttcttctaataagtctataatttttgaataactagtcatgtaaaaacttataaaacttagagctttataaaatgatatttcacccagagttgggaaatctgtgtaaggcagaatccattatggatactatctaaggttaatactataatcaatgagagggtctattgcactgcaaatcttacatatggtaagtattaactgatgtcaataagacactgtgataattattgaaaaacgtttctacagataatgaactaggtaaagcagtgtttacctgtaaatgccctgaacatgtggatgacctgcgatctgtagtattggcacagttcaagctataaaatgtctatagtcaatggtgagagaccacaactaagccaagcacaaatatacagtttctccttacagagccttccacccactgaccaggaaaagactttcatcttgaaagatgaaagaactaaactgaatcaggaacagcaaaggctactgcagcaggctgggcctgtttgggcatatggtagtaatctgctaagcacaaaggtgcgatgtggagagtaagcagagcaggttttctaggcagagattctgtcagatgagctcagtgtttataatgggaaggcagagctatggagatgtacatggaatcgatgcttccattttcatttcaaagcagctttagcatctcttgtaaaagtgtagccttcatttgtgcagatgctccttctggggctggattcctgaacattgtaatgatcaatgatcaatcccagtatttctgtctagtcaatagagtccattgcactaggaagacatttgtgtgctcttcaggaaacatatagggttttattatcaagggaattgatatgtagcttatttattgatgatgaaattacagacactgatgatgccgcatcagatctgggtaagaggtcggatatgcacagaagtggtttactcagtagatagtcaacacttctgggttgaatggagagctgtgatttctagctgtctttgcatttaacagtggtttgtaagcaattgtaacagccctgtcagatatacatcatgcaacaagcattttgcattagggttcataactgtacagggattttggttaatatgattggaatgatttagacatgctctatggcaagaaagtttgtttatcaggatgacttgccccaaattaataagaatccagaaaagctggagctcatgtggaagcaggatcttgtcagaacacagctttgacacagaacactgagctcatcggacagaatctccgcctagaaaacccgctctgcttcctctccgcatcacacctctgtgcttagcagattactaccatatgcccatcctggcatttatggaacaaatagaaacaatagtaaaagaaagaagagaaaatgaatgtgtttgtgtgtgtcttgtgtatatgtgtcctcatgggttcatgctcatgtgtgtaagtacatcggaggccagaagttgaatcatgtgtctccccctctgtttttctctacttcattagttagtcagggtctccagctgaactcagagctcatggattccagctaatgtagctagatttctttgcctttctattgttgggattatgtgtagctaccatgtctgccttccctttttatttgattttttgcttggtagtgtggtttggtttggcttggtttgagttggtttggtttggtttggtttgagttggtttggtttggttggtttgggttggtttgggttagtttggttggtttggtttgggttagtttgggttggtttggtttggttggtttggttgggttggtttgggttggtttggtttggtttgggttagtttggtttggtttggtttgggttgggttagtttgggttggtttggtttggttgggttagtttggttgatttggtttggtttggtttggtttgggttagcttggttggttgggttagtttggttggtttgggttggtttggtttggtttgtttttgatgtgggttctggggatctgaatccagttttcatgcttgtccagcaaacaccctatctactgatctgtttctcaattctaaactaaactgagatttaagctatacagttttgaggtagttacaaaattctttgaacatgtttaagacttaaaaattatgttttagtattttatagctaaccttttggaatgaggcatagaatgttcaagtttgagtagttggttttattagccagatggcaacacatctgtgaagagatgggaagataattggcctttgcaataactgtgtgaatgctggcatgcagtattttaaagtgcacccagagaaccggctttcctttccatctagagtattggacggtagactccagttattgttatatgagctagagatgaactagatgaacttttagccaaaatttacgataattgttgagtgaggatcgctggaaatagctcctaaatgcgatcagtgaggtaatgcttgtcgtggtacctctagcaaaactgttcactttgagacagacgtgcaagtggaacagaggtgcacaggacattacctccgtggtctgagagacagcagtggctgagcctggtggatagcttccatgtccttggtaaagaatcagatttatggaagtgaggatcctaatgccaacatcatggtgaaggttgtcttagaagacatggagtctgctgaggtcccaaggcctgacactattactgaggctgtggagcgctcacaaaaagggacctatcatgactgctctctgaaagacccaacaagcagttgaaagagtcagatgcagatatttgcacccaatcaatggacagaagcagctggctcctgttgttgagttagggaagggcgattctgtaggaggaccagcagtctcaatctggacccctgagatctctcaaactctggaccaccaaacagacagcatacaccagctgattggaggcttccagcacacatagagtagaggactgctgagtcagtgtgcattcagagatgatgcacccaaccctcaagacactggaggccccagggagtttagaggtcaggtggtgtggggacatccacgtggagacagggggtggggagaaggtatagactgtaaaagagtcagagggtagatgtggggggggggggataaaatatggagtgtaaaaaataaaaataaattaattaattagaaaaaataaagaagacacagagtctgaatgtgtgctctatgtggctgaagcttctaagataacactctctctctttctctctccctctctctctctctttctctctctctctgtctctgtctctctgtctctgtctctgtctctctctctctctctctctcacacacacacacacacacacacacacctgttcacatacatgctaagcctttccctttggaagatgttgagcagtgaggctatgtgaatttccagtaggctcgaccctctgcacctggctgattgcagatgtgcaaggcagcccatctcaccagctcagcactgagttcacattcatgcccatgcactgggtatagcagtcctgagggaaatggattccttgaatgaatggaggttctctaaatagtacatgtttttaaatccagccctcctatgggatccaatctagatggatgggccttttccagggtcttagtgaaaaccaggaagaatttgtcctctgcttaatactaagattctcaaaggattctagtcaacttaaagccaagcagttcttggctagatagtgacttactgattttcaacagtttggagtaaatatttctaatgtcttaattctaacaatttacttcagtgtaagaaagattgggggttaatgatttcctctccttaaatgattagtctgggcgctgcagagatggctcagtggttaagagcaccgactactcttccagaggtcctgagttcaattcccagcaaccacatggtggctcacaactatctgcaatcagatctgatgccctcttctgatgtgtctgaggacagctacagtgtactcatataaataaaatagagagctgggcgtggtagcgcatgcctttaatcccagcacttgggaggcagaggcaggtggatttctgggttcgaggccagcctggtctacagagtgtgttccaggacagccagggctatacagagaaaccctgtctcggaaaaccctaaataaatagataaaatagaaaaataaatctttaaaaaaataagattagtctgttcatttagagagaaaaatgaataaattttaaataaatactttttaaacataaaagttagtaactagtgtctgtgtgtcttttttctttcctgtgtgtgtgtgtgtgtgtgtgtgtgtgtgtgtgtgtgtgtgtgtatttgcaacaagcctcactgtttatcccttgctcaactactttgatctgtgtctgtagataaggctgttcttgaactgatagatatctccctgcctctgtctcctgagggctgggattaaaggtgtaagacaccaactagactccagatgtttcgtatgcattctttttcttctccctctaactatgtattttgataaaaatgagaaaaatatttgaatttttgtatttaatatttgcatagggtatgcgaacaatcagaacctggtttgtaattttaagcatttcagacatagcctggataatatagctgttttgaaataactgtttctcacagagtattttttgtgcaccacaagaaaaatttctcctcctcctcctcctcctcctcctcctcctcctcctcctcctcctctccctcgttgatttggatgtgttgtttggtgattagttgtgtgtatatggtgattaggtcaaaggagtatgtatcactttttaatttgttgctagcacctggaaggtcttcatcaccttcattcttatctgtcaccagggcccatttggaggccagtgctgagaaatggaaccggttgctggcatcgctggaagagctgatcaaatggctcaatatgaaagatgaggagcttaagaagcagatgcccattggaggggacgtccctgccttacagctccagtatgaccactgcaaggtaagtacaacatttgtgcccttttttaaaaattaatttcgataaacaaactgaatgaagttctcaagaaatgaaaatttaaactaattaccacagcgttcccccctctttggcatctagttggttgctaaaggatcaatataaggttgaaattagcttaggtaacatgattaagtctgaggccagactaggctataaagcaagaccctacctttaaaatccatgcacacatgcatctatacatccatacttagataaaaataaaagataacttgtgaagttttttccaatatgctgatatccaaagaaatcttctagaaagcctcccagtgctaggattacaggggcgtgtctgctgttatatctaactgtaacctaatcaggagtatagaagtcatggtgtcagaaagggttttaatgtagaactcgggaggcagaagcaggtggatctatgtgagtttgaggccagcaaaggtgatacactcagaccctgtttcaagtcaatgaataaatacataaataaaattccaaagtagttctaaggatatagctttaaagtgtgagcttttcctattggccccaagctcctcggatgaagacttttgagactcaaaatatatctgcaatcaccttggccatatgctttggtttggtctccatctaacttataacctgtttattctaatctaagttttgccatgtgactggctacgtctgctcaggtctcatgcatctgtcctctgtcctcttcctgggtgaacactgctctccctgccttactctatcccacaattcttaatcttttctgcctctggatgtcccaccttctttctattctaccctttcctatagggcagaggtttttgtttgtttgtttgtttgtttgtttttactgacaaacaatacatccatacaatacacaagatattctctgtacatatagcccagtggtagagcacttgcctagcttgctggagattaaactaagacaaacaaaacctgaaattatcttgttcattaaaattaaaagtagagaaaatctgtagggcagatttcagtcctgtatcaaatgaagatcacagtgtgaaacaaaagatcattttatggtctttttatgtttcattttctttctctaagttctgtttccttctgcatgacatccacctctacacacgctgtgtttgcattctgacaatgaacaaggaatcctgaaatgtcacctgacatatccctcagcctttagatttttaaatatcttctcctattccaagttccattaatttatttatatccttttatactcttttctcatatattaaatgtcatttagttctgttgtattttttcctacccatgtgcagtatgaattctccttctaagtctgcacatttcaatgcaacattgtgtccttgttcccaattgaaagatgaatgcaaatgcatgttcctgagggaagatagcatctattacagaagatgttctaaccgatgttgatagggtcttgaattctattttattttgaccctgtgcttggtgaataaaattactatttcagtagaaagagaacatgatagacagataaccctgagatagaaagacacagagactaagaaaatacccactaggtgtgcctacatgagagcctcagggaggcggttacttcatttacattcccaggtgttaacaaagcaagattttccattgcacagagagcttgggtctgaggtagagcagcccctgccactgggctgcaaagctgaaagcttctagaacctccctacatagcactaccagctagtgcccaagtgtccacacatcatcctgtaaatgtaacgtttattctcctgtcattgatgtctcagaagcttactaactgaggcctagtcctgaaagtttttagcttctgtacagtcttatctaggcctacaatgttttctgcctctgagacttacactcaccgtttctagatctttctgatctctggctggctggtctaatctagcttctctcagtttcttactgagttgctctgcttggcctcatactaactttagcaatatgttctaattttctggctccttcccattctctggctggctccttcttcaatctgtctctgtaaaattctcccagtaaaactgtttcttccctccctctctctgcattgctctcttaagtagcttcccttccctctctcgtttcctgagagttgggcatgtgctgtgaagtctttctctgattcatcactttgtctgccactcagttagacatcacattcaaacatggctgcttccttctgcaaaccatctttacctttgtttgggattaaagttgtgtgctagggactgagccacaccacaactagaaacagttttgttttgtttttcagtaaagaacacagtaattcacagtgtggttaaatatcctgcagtgtgttcctctggaagatggtgcacactgaagccctaatacctgtctgaagttacgtacctttcttatggaacaccaccatcatttgaaaaatctctgacagttgaactacagtagaatcaagcaattcccttaaagttagtctcttacaggtgtgctgccaggcaacatttttttttaaagtccattttctccaatctcacattcttcctatgaagagaaatctttacttactatgtgtacacctgcaacatctaaccagttgtcagaagctcaaggacctgctcactgcatagaggaaaatggatgagtgctgcttagcttgatgaaatccgagcagctgtgccccccctccacctcccgcgtcccccttcactttcacagatactcatcatattcctgttgtgggctggtagtttctaagccactggtacagagagcagacacagctcctgttctgtgcaggggacagcctgtgtctgtgtagtaagagagcattcagagaaagctatggcaggactgtgacatgcttattcatgcagtttcccctggttgctgtctgtctgtccatccctgtttgttcactcctatcttccagtctttgttcttgcttacactgcacacggactcaattgaggtcatggacatgtttatctccaaattcctctctaaaggacttagaactctctttatttatagcattacagtgcagaacatgaaatgatttttttttaaacaatgttttcacagatatgtttttagctttgtgaaaaattcattgggcttttttttttctccctcttttagttttttttttattataaagtgcaaggttgggtttttggggggttggttgttttttgttattgttggtttttattatctgctttagatgcttaaattttcctgataaagttgaaaaaagtcttcctaattaaaaaaaaatgtgatttaatgatacatttccaaagcatttctttgataatagaattaccagtctgttcaccacccacaccccttgtatactattcatggaatgccttatatgttaaagttggtgcctttgtccagaaagcagtataacctggcctctgtaccgctctgatatgtttcaatagttcctttcccccagagatctgttcttgtggtttctttggatgtatccaaaggaaatcctatccatttaaaatttggctctgagattgtcagttagaaaggtaatacaggatcatgctttaaatcgctccttgaccaaacatcttgcaattataggaaaaacattaaaaagtagaaaaccacccatagcataactctgctccaaaacacaacagctacctttagcctacaagaagcaaagtagctactgaagttgatgctcctgaagagatgaaaaaaggcttgcaggaagatgagccatactgaagacttggggtggcatctctcctcagagcttgtctctccttgctggtgtgagccctctatggatggaaatttttccactttctagtacagatgctagatcatgcctgtagttttctggaagatgtgttgtgttgatactaatttcattgggcttgttgatgacctggcctgtgactggatacaaggtagaatgctcagcatgaagaagctggtgtttactcttgtaattgttgagactctgtgcatttactttgtttctgttgctgtgatcaaaagcgctgtcaaaaagtaacttgggagagaaaggatttatgtgagctcacaactccaggttacagtgcatcattttaaggaagggatgtcaagtaaccaggaactggaagcagtaaatcctatctaacccacacttaggagtagagagaaatgctttaatgcaagaatgcttattactcctctctactattaagtgattcagaacctaaaccgagggaatggtgtagcccactgcatgctgggtgttcccacatcagttaatgtaatcaacgaaatgtcccatagacaagcccataggctgactgagtgtagacaattcctcattgaaatgttttccaagctgattctagactgtgtcaaattggcagttaaagcttagcaccatggtctgtgttggtggttttgatcactctgtcttaattctgtctaggctatatgagctctttcagggagctacaatgccattaatacctagtaaccatccaacacagcccaacagtgcttcccccacctccccacttcctatgcagtattaatttgttgaattattcaagagtcacattccagactttacagattgggtagataacacagtcgtgttattttctcatatatgtacatatttaattcctttaaatattaaaataaataactaccatataacttttagtggcttgaaaaatgagtgaagatggctgaacgttcctctcaatgactttaattattattattttttgcctctttgagtcttgaaagtggatgatttatatgcaacttcattgtcaacatgtcgtccagtcagttatttcttataaagcacctacagtgtgcatagtgttgatatgcatgccatgaattaacttcagatactcaaaagttgcctacagttgcatatgcagttttgaatattcaatttgcactttattttcacagtaatgtaaatactgagttatgcgtaggcaattatcagagctctaacacgcttttcccaataaaatgcatgttggttttataaaagcaaatcaccaagaatgattaaattgcatgattcaggtataatttcctggtgtgcatcttttccctcagggttactttgccctttgcctaactcaatttaatttcttatatccaaacctcattatgtaagaatcaggacatttgggccttaaaccaaactgccaagatacataagaaaacttagtcattaaagtaacagattctgatgtcgtttttaaaacctccaccacgtgtggacacatacgcctttaatctcagcactcaagaaccagaagtaggtgggcctttatgagtttgaggtcagcctggtctacatagtgagttccaggctagtcaaggctatgtaataagaccctttctcaaaaaccagcaagctacaacaaaaatgaaatgtcaatacctccttgttaaatttgggttctgtgcatttgcatgtgtgtatgatgcagttctattaatctgaggttgcctacaaacctgtaatgttgaggtcttgctgtatgttatgagatttttttctatggtagtaaattagttattttctgattgggttgaggagttcccatgcaggtatattatgcacatctctgtgtgtacatccatatggaggctaggaataaccttgagtatcaatcctagagtccttcctcctttccctccttttgtcttccctccttccctccccaccccactttctttgtatatcttttggagacaaagtcttacactggctagggtggttggccagtgagcctcacggtcccatgcagctctccctccctcctgggttctgagatgacaagcatatgccccactgtgtctagcttttaaaaagtagattctggagaccaagctcacatcctcagtgtacaaggccattgcaagcactttacaaactgtactacctcttcaacccaatgttctaaagttaagcatttctaagtgctcttctgaaatttgcaactgtattgctttccttctcagaaacacactgcaccccatctgttggtagagcctatacctataggcaccctgaatcagctttcttaaggagccatctctactccagttaaccattcatatggctacaggtgatcatgtcctctaagtttgggagcaatagatgaagactcactcccaagagctggggctcacacaatgtccgtgtttagagggacagggggcagcttgagagctgtcagactggtgatgaaataaagagtatggccattcttgggcacgaaatggcctctgtgaaaccagccacccgcttccaggtgaaccacttctatgatctttgttgcttagtgaccatttcctttgtttaacagctcatttcttctttcagcttccatgttaaatctgatagttgacatcctgtattaggtactatggtggtttggatatgcttggtccagggagtggcgctattattaggaggtgtggccttgttggaggaagtgtgtcactgtgggggtaggctttgaggtctctgatatatgctcaagtctgtccagagtcagtcatcctatgtcaacctttggatcaagatgtagaactcttggcaccttctttatcactgtgtcttcctggatgctgccatgcttcctgccatgatgagaatgcactgaaccaagccagccctaattaagtgttgttccttagatgggttgcctgggtcatggtgtctcttctgagcaactgaaaccctaactaagacagatactcagcacacatcactcaatagagggtcctgtattttcacaaaacacactgcctagtcgcaggattgaccttcacaagaagataaacactatcaaaagccctgcatcagggacatgaacacacagccaggaagcagagatgcttatgactgtatgctgtggctgataaagaaaggctttaggaagtcctggagtagagagtccgtaaagtaaaaagtccttaaagaatgttatccaggttactatggtgaagatcttgcgtgttcctggttgtgtttcttagagtaatggggtgtactgcattcatgcttgtagctcagggggtctcaactttcctaatgctggggccatttgaaacagttccttatgttgtggtgactctccctgccaactgtaaaattatttaattgctactacatagatgcaattttgatactttaatgaatcataaatatctgtgtgttctgatggtcttaggtaacccctgtcaaagagtcattcgaccccacaaaggggtcagctcacagattaaaaatggatgctttagcctaacactgagagcaaagctcaaagagaaggaacttgaatgttagcacctaacaggggctgatgagagaagctactaatggatttgctgaataagagggatgcaggcgcatgtctgtgtatctccatgcatgtgtacgtgtgtgtgtctgtgttcaacaatgcagaggaaagactggtttgttactgtgacacgttggagagtcctgtcttgctcttagcattcatacttagtattcctattttgcctttattttttgatgccagtggggtggaaccaaaatgaatttatacatttaactgatcatttagggacattaaccaaaacttttacggcactgtgcactatgaaggagaattaaaagaattttttgcttgcataccaatggaacataatcccatttttctcttttttttctttgagttttattagtgctatcaactttaacgactgtctggccttctttgctaccgtacaaaatgacttagatccatacatgctgatttagctctgaaagcaagctgggaggaggaagggagtaaattatattctggcagattctccttacgtttccatcattttttttctatctctcttctgcagtaagccatgaagttcttttgagaaccaaaggttaaagaagcctggtgtgtaccaacactgcctccagcctgccccagtgcagatgcccctcgtccatgccagctactagggcacccatatgctctcattagtgccaggttgtgggaagggctctccgtgctttgttgtaggccttgctgttatagtgaatgcccaaatattcagataagtggccctgtggtttcatcttgctgtggagtttgctgttttatagttagatctgttggcatcaagaacagttatgtaagctaggtattggtggcacacacctttaatcccagcccttgggagggaggagccggtgatctttgtgtgttcgaggccaccctggtctacagagtgagttccaggacagccagggctatatagagagaccctgtctcaaaacaaacaaacaaacaaacaaacaaacaaaacaaaacaaaaaacacaaaaaaaaccccatccagccaaacagacaaataaaaagtatattatgcttcaacatatataaactataatgtgttaaaaataacaaaagactctgagaatgtatttccaggagcgtctctctcctcagttcaggcatggtccttacactgagtcgtgtgcctcttgtcttaacttgtggatgttagagttggctagtcttgggcttcggcccacacttggtcctctctacttgacttctaggtaccctgccctcctgattttctcatcctctcaatgaagctccgtctctttccctctctggtccgttctttaagctccttgtagaactgggaagcactaggagccaggccatcctgatgtcactatatgtagcctttcctgggtttagaatctatctgcaggccagacactcccagctttgtgaatgtgctgatgtgtcacctctacagggatcctaattttgcacatcctatggccaagctgaaagcactgcagagttgacttttaagacattctaccctgaattctatacccccatctcacttggtagagatgtgacttaagttgcttaaaataataataataataccttgaaccccatctttctcattcaatgtgttagggagttttaagttttctcatcaagatagagaatctaaattggccacttgccaccattcatctgactctggggtccccagcacagcagccagtatgttcctgttaataaatcaaacacccagtaatagacatagtctcaggaaggcatgcaagagccccgtgtggccccctacgcctcccacacaccaagctcagttcagctcttgctcatcttctcccacactggtctcagccatgctggcctcttgctgtgattcaatcacagacccttgctgtgtcctagaatgttctttctgatagtctacaaagttaactctccgctgctcctcaaggtgctggatggcaccttccaatcctggcaacctctctttgttccagcattctcatcttcctatgtagctgctgtactattttctattctttgtgtacccacagttccataaactcaataaagacttgttgaatgcaaaatgactgacacatacctaagggtatttgattctttttaatttctttatatctatgtaatccttttaatttcgttcatttaccaaatatcacatttaaaaaacacttgtgtgcgtaattttctaaaacactgtcttatttatgtatgccaggtgaatatcaaacttgcagtgtagctgagggtgaccttgaacttctaactctcctgcttccacctcctgagtactttttcaggagtgtaccactatacccaggctatgttaagctgaggattggaccagggacctcgtgcatgcgaggcaagccctctcccagtttagctgttaccttggcgtttttgctactttaagtaactgaatttttaggaaaaatgatcctctctttagacatataagcaaggatctttcatcgacagcttagagataattttttgatatttttttgatctgcaagagttggactgtaagaaaccctaccggcacagctatagtttaacatgtattagttaagagacttcttttccttccgtgtcagttcacattggccttgaacttgtggctttacctttcagtgtcatcccagtgctgagagtctaagtgggtgccatcatttctggtcaagaaattatctcttctctgtctcaatattgccttaattgttccactcagggggtgggaaagtaatgtttatgggatgagagggagtggactggcaaatcaaggttattgaggcatcctctaaatatggttcattttacttctggaatatgctatcagattgtccctctgtgcatggctcctattatcccttaaatagatgctttaaaaataaatatcagatactctttaaaactaaatatgttaagatctccaatgaccataggaatgtaaatgtacagactctttgattcaatgattgtcgtagatctcattttataaatgaatctaacctggaagagatcactgaaggaaatccgtagaaaaatttatatacactgccttagaaatgaagcattggcttctaatacacagtctcccttttatttcataaatttatttttagttatgagtttgtttgtgtatatatgtgtgtctgcagttatagatttatttgtagttatgggttgtccaggaaggccagaagaagctgtctgaccccttggacctacaggtagttatgggccacccagttctggtgctgggaagcaaactcgggtcatttggaagaacagcaatccctttttgccactgagccattgccctggcccatacatatgtaattgctaatagtgtgttatttaaaggtagtaatttgttcacgacttctgttttgcagcctagagactataattaataacatgtataacattcttgaaaattgttgaaagactatattttaatattattgtaagaagctcaaactatatgagatattacatatgttagctgcatgatccattctgcaagtttattatttatttcaaaataaagcattatatgaggtagatgtatatattttatttcttaatgaaaagtagaaaaaatagtttagaactattgggaaaagatctttaccaatgctacatccaatagagggctaatatccaatatatacaaagaactcaagaagttagattccagagaaccaaataaccctattaaaaaatgggaaacggagctaaacagaatttttaattaaggaaactcgaagggctgagagcacctaaagaaatattcaacatccttagccagcagggaaatgcaaatcaaaacaaccctgagattccacctcacaccaatcagaatggcttagatcaaaaactcaggtgacagcagatgctggcaaggatgtggagaaagaggaacactcctccattgctcgtgggattacaaactggtacaaccattctggaaatctttctggtggttcctcagaaaattggacatagtattacctgagtacctagctataagactcctgggcatatactcagaagatgctccaacatgtaataaggacatgctccactatgttcataggagccatatttataatagccaggagctggaaaccacccagacatccctcaacagaggaatggatacagaaaatatggtacatttacacagttgaacactactcagctattaaaaacagtgacttcatgaaattcataggcaaatgaatggaacttggaaatatcatccagagtgaggtaactcagtcacaaaagaacacacatggtaacaaaaaaacctaggacagcaaaaactcttctcaatgataaaaggacctctggtggaatcaccatgcctgacctaaagctgtactacagagcaattgtgataaaaactgcatggtactgctatagagccagaagctggaaagaaccctcaacagaggaatggatacagaaaatgtggtacatttacacaatggaggactactcagctattaaaaagaatgaatttatgaaattcctaggcaaatggatggacctggagggcatcatcctgagtgaggtaacccaatcacaaaagaactcacatgatatgtactcattcataagtggatattagcccagaaacttagaatacccaagatacaatttgcaaaacacatgaaagtcaagaagaaggaagaccaaagtgtggacactttgccctttcttagaattgggagcaaaacacccatggaaggagttacagagacaaagtttggagctgagacgaaaggatggaccatctagagactgccacacctgcagatccatcccataatcagcctccaaacgggcgctgacaccattgcatacactagcaagattttactgaaaggacccagatatagctgtctcttgtgaggccatgccgggggcctagcaaacacagaagtggatgctcacagttagctattggatggatcacagggcccctaatgaaggagttagagaaagtacctaaggagctaaaggggtctgcaaccctataggtggaacagcaatcaatatgaactacccagtacctcccagagctcatgtctctagctgaatatgtatcagaagatggcctagtcggccatcattggaaagagaggcccattggtcttgcaaactttatatgcctcagcacaggggaacgccagggccaaaaagtgggagtgagtgggtaggggagtgggaggggagggtatgggggacttttgggatagcattggaaatgtaaatgaagaaaatattaaataaataagtaaataaacaaacaaacaaacaaataagaaaaaaaaagagttgccatgttcacagtgtctcttttcaacaataaaatccctaaggcaaaacaaaaccacacatggtaggcactcactgataagtggatattagcccaaacatttgaaatttccaagatacaattcacagaccatatgaggcctaagaagaaggaaaatcaaagagtggatgcttcagtgattcttagaagggggaacaaaatactcacaggaggaagtatggagacaacgtgtagagcatagactgaagaaaaggcctccagagactgccccacctggggatccatcccatatacagtcgccaaacgtggatactattgtggataccccgaagtgcttgctgacaggagcctgatatggctgtctcctggggggctctgtcagagcctgacaaatacagaggtggatgctagcagccaaccatgggactgagcatggggtccccagtggaggagttggaaagagctgaggggatttgcagccccatgtggggagcaacagtattaaccggccatattctcagagctcccaggaactggaccactaactgaagagtacacatggagggacccatggctctggccacgtatgtggcagaggatgatcttgttaaacatcagtgggaggagtggcctttgggcctgagtgtgtttgatgcttcagtgcaggggaatgccagggtgggaaggcagaaatgggtgggtggggagcatccacatagaggcaaggggggatgggatagggggtttctgaagagaagatctagataggggataacatttgaaatgtaaataaagaaaatatccaattaaaaaaaacccaaaacctattttcaatgatattttaaatgattaatgagctctctgttaagtgttcttttaggtataattttcaatcataaagataatatttacagatgaaataatgaacagctgggtcttgattattcaagcttatctcttcagcttctcaagagctgaagtaggggggaccacacatttaagtcctgcctggagtgcatttctcagtgaatttaaggccagaccagtctgatcttaactcaactgagtgagatcttgcctcagagtaaaaagggatagccagctggggttgtatgtcagtggtcagactctagctgggctcgcacaagtcgctgcttccatccctcacactgcagagtgatagcaaagcaaaatacacactcttctgtcttaccttcctctagtgccattgttctcatccttcctaatgcttcgaccttttaatactgttcttcatgtggaagtcaccactcctaccataaaattgctttcattactagctcataactgtcattttgctactattgcagatcgtaatgtgaatatctgtgttatccaaaggtcttaggtgacccctgtaagaaggtaatttgacctctgcaaaggggccatgacccatgttcccatggtggtatctcctcttgtatacacaccgtccttagctttaattggaggcctcgttttcttactctgctttcacctttaggtttctgtcatgctcacgttctgaccttgctcttgtggccattatcatagtaatctttgaaggttgtgtaatggttcctagtgtggacctgccattgtggatctcaataatttcctagtgttggatatttaagctgccctcaatttcttaaagacataaataatgttgcagtggacacctttttatgtgtagacttttttttcccctcctctggttcattttcttagactccatcctcaaaggtgaaattcttgtttcataccatgtgatcagcataatgactttatagactgccaaattgggtttcccaaatgatcaaaccatttccctccctctagaaaatatggacacgtcagtgctctcttgcttgactctctcacttctgctccttgtctgatggacttgcactgctagcacccaaactctgctactccacagtgggtggaaaaaacagttttcagattctatacaggtctggcccatgcttctcttcttttcaaagaataaagaggaaaatttgggagatctgtttgacttagccatgtgtagagtagcagggagatgtggtttcttgaactttctgggggagaaagttcctatttatatcacatgggatgtgatctaatcaacccctaagtccccatagctttacttcactgttatggagaagatttagataaaaaaagactaaatttttttctcatctaagagtctaaatatattgcaaagttttatatgtatcaaatattttagcttaatcttggggaatcacaaagtttcacagccttcctaaccacatcacgtgaacattgggatacatattaagttcagtttttcctggaaaggggagattggtgtgttagcgagtttttcttgctataacaaaatacttgaggtaaccaccttaaaacagtagaaaggtttgctctttagttcatgatataagaagatccagtccatgactctaatatttttaggcatatggtaagggggcagcatcatagtgggaatgtatgagggaagaaagctgcttgcccctctgtcagcccagaaagaaaggacgcatgtcaaggagagaagggaagagcagagctgcttcaccgcattctgtctcctgtgagcctgttttcttagggagagacttgcaggctctccacgtttctgcagaagaacggataatattgtttgtttagcagcaacttttacatgacaccaagctgatgctgtgcccagaatgaaaacgaagagctgtgattgacaggtggtagtttttgacctttgccaagccagtcacttcttcaaccaccttaccccttaatccctggcctttccagtaagttctagcaggtggagtgttccctgaccagtgagccagaagtgttccctgaccagtgagccacagtgaagaatctctgcaggtgcttatagttggatctgcagaaattcattgtgctgcctggcactctgggaaatagccgtggctactggagccctccttgctgttcagatgctcgggacggtcagatggaagaagggatggctcagttaagagggatgctgagctcctagatattctggaaggaataaaattctgatactaatgttcaggttttcgtttgaggcacatgagagactagatggctttactctcaattattctgtctttctgtccatttatgtgtttttaaacctgtagttcacatgaaaagttcaatgggaaatgcctctgcagttaaatcatttgcctggcaagactagcatttggatccccagatctcaagtaaatgccaggtgggcaggggtggtcctgtgtaacttgagccttggaaagaggagcgggaggattcccagggcaggcaggctagtgatacaggggtagtgtttgactgagagatgatggaagagtgatggagtgatcaggagtgattcctcatttcaatcaggagctctacatacatgctcactcatatatgttcgtatcctgatacacatgcacttaacacatgcaaactcacacagattcatacacatacacacacaccactcaaaaggcaaaatgcagagagaaagagagagagagagagatgcatatgcctttaagagactcctatgtttgagaagttgttcacccttcctccctgcattgtatgtttgtacttagtagggctcttgatagcctgcttgtgcttttcaaagtctggtgacaattatcacattctgcccttctcctcccccttttagattgtatgacatgatctgtggctatgtctagccattttctgtatattcagtatgagagtagtgtttgttttaacttttttattagggtggaaaactctatggtactttgctagctccataccttgggagacagtagaatgtctccactcgagacaggttttcaggtagactatgctgtcccggaacttgtgttgttcctgccttagtctcttgagagctgagactactgtactcagctaagtgaattttattttttaatggacacaaaatactttttgtattctcccttttctattgttgtctcttgagcatttgaggtctagtaaacattttagaacgtttaggctttaaagtccagtttctgctttctttggtgaagttatcttatttttgtgagttattttgaagttttcttccttgttccggttgagtcttgtttactacatgtaagctaaaatttccctttacactgttctgtcctggagattatttagggcacttatttactgggaaggtatattagttcatttacttttgctataacagagtccttgagactgaacaatatataaggaaaagtagttcacatatctcatagctctagaagcagagctgtatctagtgaggtcttcatactctatgcacactgatagcagaaggcagtggctgcctctgacagcaggggacaggacagatgctgtgacctgctgtgcagtaattggaccttatgagaatttatcagttcctgggagaacttgtccagtctcacaagaaagacatcatcccctcttaaatcctcacgttccaaccctacgtcaaccaatccgtctcaacatgagtggtgattgtatcagctgaatgtgtcacaggcagggccaagctgccacacgagtgtgcttctagcttagtggccgagctttgtttggtttggcaaagtcaccaggtgtctgcaaagacaggaagtgcatgtttaccaggtatttctccctgcaaacacaaagactcagattctaaaacactgtcacagaaagaacatccctgatccttcctcgctcggcataatttcagctgtcactaggcagtacccacttggatgagcctcacagcctgtgaaatgcttcctttgaacagctggactgaatgttaccaatcccaattcattcttgcttgtctgcgtatggtattgttagaataatggataatgccttcctcttgagctgacatgattgttcctctcatccagtgatggagtatagttctccattctccttagccagttgatgcaggggacgggtgcatagccacacagggtatccagacagcaaggtaggaagtgttccagaatgagtgagaggatccattgtatgactaaatatgctcaaaccctgaagatcaactcttacacacacatgtgatatatagtgatatatagtaacacatatatgtttgtgtatatgcatgtatgtgtgttataaagaaactgaaaaagaaacatgacctgcagttttttttttttttatgttttagtttaagaacaagatatttgcatatcgttaagtttaccccattaagtgtatggttcagcctttggtctatttacagaatcaagtgagcatcattgactcctaagtttagcatttcattatcttcgaaagaatggaacaaagctatagccttagctttggcctcactgttgctgaagccttgatgggctgactagactgcatcctctatccatgtcatttggggtaggtagatattttacaaagccaaacttggaaacttggaaacctggaaaccatgcccttgacaccaatactggaagcatctatccctgtagacttccacagtcctccttcagttgctgagtcctgtgagctaccaccatgaggctgccctgggaactggaaacagccagatgcctcaaagcaaacatgtagagtttggccatcatctatgacttggggaaggagattagaaacaggtatgcagcaagcaagagcaccgtggagaggctaaaatgaggcctcacctcattcactccagggctggttctggagtgcgtggctgaagcagattacaatgtcagatcctggcctttgatagttcagaaggtccccacatctttctatgagatgggagggttcagctcatttctcctgttgaaagaaaattcatccccccaacctgaaaatagtaactgcacggcttctttttgctttgtttcccctgtcctggctcattatactctgaaacactcaaaaattgggtaaatattttggagttagttaagatgagcattttaagtggttaggaatggcctaggtctttttcttccctccccttttttaaagctttcatgtaaaaggtgcctatgaagttcccttatagccctccagtgtctccccttcatcttcctatggatgtgtttaccatttgtatcactcacattggctcattgtaacccaagttcctcttcataacatcccaggacttaggcccccagtggttaggactcaatgattgacttagaagctcactgcatggctgtccagtgtggcacctgcgagatagagtttctttgattaaacagttgtgtggcgagtgctctcaagtcaatctaaaatgtgcaagttgtaagtaaagcaaagagagtgttctatcaggacttgagcacccgtggaatttctctactgacatgtttgcactaagctgatggactttccctggaagagaaggactaaaaccatttgcaccttggtttgcatttattacccagtgtaatgaagtttattctcatgaaaaagaacccctgtgtacctgaaccccctcaggcctccaacactaggcagctgctgatatacttttttttctctctgtagacacctctgtggtaatggaatctcacaccacaggcttccctctgagtcatttcgctgagaacatttgttaggtttttatctagtggtagtctgcattggtctgtaactcattttccttgctaagatctgtcgtgcagctcggttgcattttgcttatctactgatcaatggctgcatgtttggttggtccctcggtctggctatgatggcgtgctgttatgaacatttgatgccgtgctgttatgaacattcacgtgtgtgtgtgtgtgtgtgtgtgtttaatctgtacagatgttttatttctgggtagacctagttatgggatatctaggatacagggtaaaataaaccctgtatttaacttttgaggaaccaccaaactgaaatgtcttatgagtctacgatccccaacagtgtgtgagaattcagttcctcacaactttacctaagcttgttattgtttggatagaggttgttttcggtaaaaatataaagtcattaacacagaaaaattccaattaggttatcttatactcatttaagtggctcccaaatgagacacgagataccagaaagtggatgctactttgtatacaaaacaactcattggactctaattaccttatcattaatgctcaggaaaatgaaggctttcttttacgtcgaatggagaggtaaaaggtgtggtgattatgtgtgtaatacagttgagagtcgaatccctttgtgagtgcaattaaatacaattgaaatagggcaaattgaataacaaaattaaaacgtcaaaagagcgtatgtacaggtatactgagtgtgttctctaggctactggggagagagatggtatcagggtcagagtcccagaagtttttacttagggtgctttccacctgcccatgcctgctgtacttcttctctggcttatcaagtcagctcacctgatattccttaccaagaattcaaggctgggtgatcctccccccccccaacacacacctttggcaggttgtagattaatgtgctaagaaatgcaaattaactatggaagactctctactactctgatttcatttttattatctagacgacccaacaatattgttaagaagactatgtaaatttgtagtcacttcctaacccatttgcctgcctggctcttcatcagtttgcctgtcatttggtatcaggtgtacaaaggtgcgcacatagacttctgccttcacttctacctgtgtcttgagccttagctattgccttgtataggggccaaaggcgtgtggttctctcctgatctacacactggaatcttccccccaaggctggcgcatggtttttctctgggggaagaaactttctctctttgcaagactcagatgaagccccctccccagcccccaccccacatcatgaggaagcactttggagccaagctcagtgctcaacttcctgtagtataagatccagaagtcctgagaatttatggtgtatctgagaaaggtagaaattaaataaaacataaaaaaaggaatacatactgtccttgactaatagatctgggaagtacaaaaagacataaacagagtaatgggaacaggaaatgtacagaacgggaaaggtgagcgctactgtaatggtagggtgactgtgcgaacctccatctataaagcattaatggtttgaagaacctccagtgtggctgtctggggagagagctttctgagctcagccaacagccagccaacacaattgctctcctgtgagagtctccatgcataattgataaagtttcagccatgtggggaatcgatcagtttgtctcctcagtagtttttctgtagacaaacgtttattttctatttgaatgtgagagactctaaacacaattttaagaacaactgtcctctgtctgtccccttccctcccacagcactctccaaggcactttgtgaactgagacattttgactggccaggcacaaatactccttttccagtcactggatcacctctcctaggttccccaccatagcatctgggatttaccctctgggacatctccccatcagaattttcttcctcctgaggcccaacatctgtctgctctccctcatttcctcttcagacttagtctttcttccattttttaaaatgtctgttctggtttccctttagcaatgtctctaaaacactctaaggaatttcaatctctctctctctgtctctctgtctctgtctctgtctctgtctctctctctctctctctctctctctccctctctctctctctgtgtcagatgcccccgagggaaggtgtagtcttctagcacctctgcctcttcttctgtaccttgcatttgaacagttacatttctggcaagtcctctcagggaggagagttgcagcagagccctggttgccattttatgaatcttcactgcttttctattacctagttgcactcagctctaggagatgagtactcttgactattaattttttttaagttcaaaaatataaatgaatgtgatattctcataccaccattttatatttatttataagtggttttggaagttaactattaggaatgcctctgcatctctagatccctctcatctaaagatgtgataatctcttgttaagaaatgtggagcagacccataaatacatgtatttcttctcattctcttctgactttttctttacatacatgaaaacactatgtgtcagaaaactgatctgtttcatctcgtgcagctatgagaccctggaacaccttgagctgcttttcttgaccaggaatgctgaaggctgtgtttcctaacatgaccatttaataacactccttgactgggggtttgtcccctctccactgactctgctgtcaggctttggtgtgataagtgagggagtatgcataagtgttatctatggaaattattttcagagacagttttccttcccacctagatccttacatatattgggttgtagattttattttataaggggctggggaggtcctactttcattttttaaaattcttagcagataataattgtccatgaagtcaaataaccttgaattgtccttgccctggctgtccctttcctctccacctgtaacagctccctctgactttggcccacgccagtttatctttgctgtctctatgtgatgattattctggaacttctacattttttccatttttactgagtacaaaagatgatgatttggcctccaagtaaccttgcgtcctatcaccattgtgtcaagcactatccaaacatttaatgattccggaaaggcaaaaggaaagacttgattctacaatcttaaggggaaatattttagggaggaaaaagaccccttgcatgttcatagtgcatagccactggcttgttctatgatcagttattagggcctgaagacgtggctgtgtctgtactggccagaaatgacagcagcagctttcagttagctttgctttagtattgaaaacagggcacgagacatatttacatgttggtgtcttatccccgagtgagtgtggctgtcatgaaacccttgtcaattagagtcctaatcaccaaacattttataggagcaggggtgaaagttcatctctacttaaaagaataaatgtgctagagaccagttgttctgggagtcccagatctgcatgcaaacctcaccagggaaaacagtaattgcctcagcatgagagacggacggactgtgttttaagataattggagactgtcttttatgtgttctctttgctttagttttgatttcatacactttaatttgtgcctatctcttaattttttctcagtgtattctaaagaacataaaaccctctgaggccttcattaccacatgtgaactcacctccttcagtatcattggatgcgattgttcttgtcagtcttaaggaagaagtgtctttgagcaggctattatgttttagcaactctacacagtggggattctctaagttcacatttggtaaattcaaatacaatagctaactcctgtagatgaaaatcttaaagtgtccttcccgacattcatcattttcttctttccttcaacacagacaacattttcaggagccctctctttggcttttattcacactttctgttgttcctacctgtaacacattttcacttgtaacttatctgaatgttggcttaagccactccctctgcagcttcagtcagaagtggtaaagctaaaccctgcgttcatttgctgaaaacatgggaagttgtttatatactccatttctgtttctttttgcaaaggtgctgagacgtgagctaaaggagaaagagtattctgtgctgaacgccgtagatcaagctcgagtttttctggctgatcagccaatagaggcccccgaagaaccaagaagaaacccacaatcaaagacaggtgagcgtggttcatttctttagaaaaaaaaaaaaaaaaaagacaaccaaccaagcctttttcttgcagcatcaagcatgtacaaatgacggcctgtcacatcgggatatttagcttaaaatgaagcaggaactaacttctttattaggaaacatcaattcttaatatcattattagattttgcagtgttgccaaaagaagctctgtggtatattcaaaaacaaacaaacatgcagagccttggatatggttcagcagttcggcgccctggctactctaccagaagacctgggtttgaatctctgcaaccattggtaaccccagtcccagggaatctcatgacctattctggcatccaaggataccgggtacacacatggtatgcatacataacatgggtatgggtaaaccgctcatacatgttgtataaaaacacatgttgcccaaagtattttcccatcattcactttacccaggaaaagcaggcatgcagagtgccttactgtgtttagcagtgcagatcacttccttatgaggggcggggtcagtgggagcccctttcctcactgaaggtgaactctatatgtataacttacctcagctctcattccagtttaagcatcatgctagatcccctgcttccccttttaagatattgccttcctgcagcaaccggataataatgacaagcaaatgacagcgtgagccagctgacttcagtgtgactccccaggaaggctcctcgtggctggctctcctcatcaccaccctggtttctcagttgctcctctctgcatcctcatttctgccttcctggctgcactgctatgttttgaacattcagggttgctccaatctcgaaacctttgtgtgtctcttccctgtttctggaacattcctgctcctctcccagatccccatgcctactcctaccaccactacctccccacttctcctcccaccctcccttcctctctgcttctatccctcttcctactcctcccttcccttctacttgggtcttcatccaaatgttgcatctttagttcttcccagtgttgtgcccacatgtgtgcacatgtgcatcaatgtgtgtgtccgtgtgtatgtggaggacacagtcaacatggagtattttcctcaatcctgctttaccttggatttttagttttctactataaacggtccctatggtttggctagactgacccatcagcaagcttgggggtcaccagtcttgacgtccacaagcatgtacagtctggtgatgcctgcacagaaccttgcccagcttcttaacgcagtgctgggatcggaactcaggtcctcctgtttctgtatcacacactcttcccactatccatctccttcactgatgtattttgtagtgtctgggatgtgatccctgcctctcacatagttactaaatggattaaagtatcaacagagtacggcgtggggataggtaagacccccccccccccggacacatttcataaaaaggatttaggctagttgcagatgaagcctaacacaaagaggtaagaaagaaagcaattgccactacccacaataccctgtatttgtccaggggcttggttgtacaccacaaaggacagggagtttgaggatcagagtagagactactgtctccgtgcacacccttaaaatgggagaagaggtgattaggtgagaagacagccacacaggaaactcaagaagaacgaagaccaaagtgtggacactttgccccttcttagaattgggaacaaaacacccatggaaggagttacagagacaaagtttggagctgagacaaaaggatggaccatctagaaactgccatatccagggatccatcccataatcagctcccaaacgctgacaccattgcatacaccggcaagattttgctgaaaggacccagatgtagctgtctcttgtgagactatgccagggcctagcaaacacagaagtagatgctcacagtcagctattgaatggatcacagggcccccaatgaaggagctagagaaagtatccaaggagctaaagggatctgcaaccctataggtgaaacaacaatatgaactaaccagtacccaccccagagctcgtgtctctagctgcgtatgtatcagaagatggcctagtcagccatcagtggaaagagaggcccattggtcatgcaaactttctatgcctcagtacaggggaacgccagggccaagaagtgggagtgggtgggtgggggagcgtgtgggtgacttttgggatagcattggaaatgtaaatgaaataaatacctaattaaaaaaaaaaacaactttaaaggggcagggcgtggtggcgtacacctttaatcccagcacttgggaagcagagtcaggcagatttctgagttcgaggccagcctggtctacagagtgagttccaggacagccagggctatacagagaaactctgtctcgaaaaacaaaaaaaaacaaaaaaatctttaaaggacacttttgtagcttctctcctttgttcttagactcaggattttgctcagttcccatttccaaccaccaattgggggtgggggggaactggcaagagaaaaatgttacatcaatttaactttatgaggtttgtccttttggtttggtttggttttgcaaggaaccattttccaaccctctccttccttgatattattttctgtaatggtagcccattttacctgctgttaaaagtaaatggagggaaattatccataatagcttctatcctttttttgtttactgtgacttatgcacaactgcgatcagaaacagagactgtttgagcattagtcatcccgagtaatagtgaagtgctctgtgttggaggcattagtgctagcccaagccgtagatggcttttagttctacttaataagcagtttttgaatacgctctgtgcattatgccctagggtacaaagatagatccatctctttttaattctagaaaatagttttctccattatttttctctcaaacgtctttttcccttgcaagccccattccactcattttgttcttctgttatcaactttattaataactggtgttgcatgtattttcaaatatttgggaagcagtaccacccagcattatcatgtgtgagggtgcgcatacatgtgagtgtgtgcagaagccagaggttaacctctggtacctttcctttttttttttttttttaacctcttctttacctccttttgagacacggtctctcatttttacctatagctctccatccagctatgctgtgctgtctggccgtcgagccccaggtctacatgttgtctctgcctccctgtcagtaggattacaggcatgtgactttatagctgactttttacatgggagttctgggcattggattcaggtcatcctgctggcatggtacatatgttacttactgaaccatcagcccgtgacccaagtgatctgtctaaagaccagcactggcattcctttagaatgggacctggtgtagaaggttgagcagacacctgacgtcagtgttcgaccagtctgctccagtgacgaccctgtctcatgccacccactctgtgccccacgctcgatgtccactggacaccagacttctgctttctgcagccatgcactgccttgtcttactgttcacttttccagtcatgatccctctactctgctctccagctccttcctcatatactggcacagcacctacttgctcgaccaaccccctcccaagctcagccctgtctcagcgacttcttaagtactctgctgacagattcttgcctgatttcctagcactttatcatcggtgaaaccatgccaccaaaggctgactcgggcacttagcccaccctggggccccactgacttcctgtttatcaagaatctgaagaagggatttgaacatgaacagtaaatacaataagtgggacatatagaccctgttctgaacgcaggtgaagcctacaggtactttctcagagacacagactgacattttagacaggttgtaagtactcgaactccatgacctgtgaattgcgaacaagtaactaggtagaagtgacaagacagggacaaggttgacaggagtgaccacagccagatgacacaaaccaggggaaattaaaaaatacagatactagataagacctgtaaaatctgaagctatgagttgcagtttatttctgaaggcagaaggcataagaggtcttactgtattttaataagtttcctccccaaagtgaaaacaataaagaaattgagttaaatggggtatcatgtaactatgtggaaaactcagttaccagaacaacgtgcactgtttagaaatgattcaagtaaatacgatttctttttgtgcaactaaagtaggagatttaaagagctttgtgttcagtgttcttgtttgaacggcatggaagtaatctcatttaatctatcatatcgacacatttttccttttaatgcaaattgcttttagttgatcattatcatccagtgtataatgggatatacgtttcttatcatttgtgttgtttttttttccctactttttaaactgcatttgtgttcattctttgaaccaggtgaatgtgctagacagattataaaggtaccatttattattttttaaaaaaaataccaaatactaaggccaagagcatcttgcttggccgagcaaggtcattgagataatcaaaggaagatgcagatccagcactaagctgctgcttattcaccttctctcacccctgggctttcactggctttaggcccatccctgtaatttcaccctctccatctctgctcatgtggaatgctctggctgctgacctcctagctccttcttgactcccgtgtcaagaacctcttagccttgcacacacatttcttggctcttctttgtgctgccaacttcccttgctgttctcagagctgcatctgaattgtgtgctggctcaaggatctactcactgtggggtacacagccagggaccacctctgcctccccaccctccattctctagagttagtggggggcagaacatggcattttcccaactgcccatcaccatcaatagcaatttctaatgcattataacacaatatgatattttgttcattaattttcccacaaataagctttaaaaatgatttcagctaaagccttcctgttaccgtgactacagtatccttctcttgtgagaatggctcgctttatcctaggctggtcatctttgcttcatttaaatgatattcacaaatagtcatagaaaaatatagttcttagtgtaatgtgtttatctgtgtatagttagttatatgtctggtgtatgttagtgctatacccgcaattagttcaatgtgactggaccgggggtcaatgggaaataatcattttttttagatcagtgtttcctctttgggtctccgatggctagctgtgtgtattaacaacatttgttctatctcagtgtatgttgtactctttgaaataccaaacacaacaatataatgtttccaaaggccaattcctggcagtgtttctctcttatggggctcctatattgtaggatattgatgctcactgataattaacagggcaaggcccagctcactgtgggtgcttccacctctgggctggtgggcttgggagctactagatagtgggttgaacaaaccatgaggtccaagctagtaaacagcattccttcatggcctctccatcactcttaccttcaggttcctgccctgaatgggttcctgacctgacttccttcaacaatcaagtgtgattttagaattgtacgctgacataaatccttctgcccaagttgtttttgtgcatggtgttttatcgtgggactagaacccctcggacagagttatctggcagaagaacccagctgggcttggtgtgacaggctgaagggtgcttatccttttggagaactacagacatatttcagaatctaaatcacattgcaattccatgtcagctcattttatagcagcaatgacagatttgtgcagaaaaaaattttatgatcattgaatgaatgacggtagggaattgtcatatagtttaatagaatgtcctttttgtatggcttctccaagtaacttagggttccattgtttccttgtagccaataaaatgaggccaaattacatcttacctaacagaaataattaagctattaaactggcaggtggttttcccctccaggctttttgtttgtttgttttgcaagtaacaggcttatctttcaaatcccttcattgtaaaggtggaccctcatgcccctaccagcgtccttgcttccctgcttccccactcctaggccctatgggccccacaacccagtcacaggaggagcagggatggagctggcagcagcagctgaaatgccacccaggaacctggccttcctggtttcctctctgctggttttcttttccttagcttctttttcacaagggatgggagtagactgcctctctcgtcatctggagtctcttgaggaaagccttcccctcgtttaggttaagtgaggaggaatgaggctttctaggactggccaggatctatcctcagaagccccaggctaagtccatgagaacactctgcattaagagtgctttctaccacccattgtacagatagggacatttagaatgctcagttcataagtctatgcaagttagaagccaagatttgagtcattaaacttggtgcttgtaacctctagaggtttttaaatttacttctatcctcattggtatttctgtaggaaacttagcagcataattaaatgcatataccttctttgtaccctctgctacacttcccatcctaaagtcccacactgcttaatagagtcatacaccagttcaccgattcccttaccgagggagaaggtgtttaagcaacattagaatttgtcttttcaattttcacataaagagttgaagtatgagtaattgctctcagatctgtagagcacagcaataatttaattagcttcccaagtccaagttagatgggtaaagttgtaacacatgaaagggcatagaaaaatatgttactttctgtttcagtgttcttaactacagatagatatagtgatccaaccttgaactgaagaagcccatggattgggcagacattttttagaaagcaaaacttcttttagtggttatgaatatcactgcaagaaagttctgtgtaagtaaataagtcagcactctctctattgagaacagaagttagtgttatggacagacatggttttaataaattgcttgccagctgctactttccccagccagtgttgtggccatcaataaataaaacacatttgcttcataaaaagatatggtgacactttacagggatatattttatggggatctgcatccgggatgtcactttctgattttagcataaaggacaggaaggtgctacagcccttgagcagagtgtggtgttttttctggttgttgtttcttggttgggagctagaaacttctgagatgtcaccgtggttttgaagatggaaggccatcaaaggcatatatgtccctcttccgctgaactcatcgattgttttcacagaacataaacatgaaacgtacttcttcaataagaatagctaagctcaggtagaaagcttctgaaatttctgacttaaagatcactagcttttgtgtgttgcggggaaacagcccaaggtgtggggagaaatggatgctaatgtgtcaagaaagagcttttaaatctatggctcctgtcctctgattctttggtgtgtgttgggttgggtgggtagggggagatggttgtgggtcggtgtcttagtcagggtttctattcctgcacaaaacatcatgaccacgaagcaagttgggaggaaagggtttattcagcttaaacttccacattgctgttcatcatcaaaggaagtcaggacaggaactcaaacagagtaggaacttggaggcaggagctgatgcagaagccatggagggatgctgcttactgccttatttcccctggcttgctcagcttgctttcttatagaacccatggggtattagaggccctgggaatacatgtgagagcattgtggatcccttgtcctgctgacatcgaatgttctcagtatttttaccccattcagtactgtcttcctgtccccagtgacctgctcattgctgtccagtgtgacactgttgtcagcaggaggacattcagggagtcactgctgcagagagtcagtccggagggtcaggagttggctctctgggtgccacgcaagctgccctgctgcgttcagcttcttcctgcccctcctgctcctgccctgtgtatggctgtcattaggagtttctcccttagctcagcacactggcactgcttacatctgagagcatggtgggaatccttgtctgttttgtaggcagaataaaatctcagtgaccaccagtgattttctttctttctttcttttatttaatttaatttttttttacttattcacttgacatcctgttcacttccccctcctggttactccctctcctacagtgtttcccctatcccccttccccaacaaaacagtgattttctaatcagaattgccctcactgagacccctcagccctcagggtggtcctcctgcctctctcctcctccttcctcacctcatgctctgcagaaagttgccttttgagattctggaagatgtttcctaccttttttttcttgaactttatatatatatatatatatatatatatatatatatattttctctcattcccccctcccatgcgcgcgctctctctctctctctttctctctctctctctctctctctctctctctctctctctctctctctctctctctctctctcattcaccatactacctttagcctatcctcattgaaagctgtagttttctcatctgctgggcaatcagctgagtagcccctactaacttgtcaaccttataatttgctagatgagcataattagaagtcttaaccagctgagtgcacttgatattcttgtgatcttgtccataatgaactgttaccatctgccacctcccagactagaagtggacagggtccccttagccactgacagaccattttaaagagattaatttgatcttaattatttaatcagaatacttgggagtggaaataagatattccccattattttaatcagaaataccttttgattatgaagagaggggaggggctgtaaagagagagaaataaagatactggaagtgtgagcatccatagggaggcacaacccatcacttttgccagaatcccaaggaatgtgaccttttgcttactccactcagataaaacagaagtatttagggagacatgagtgtgcgctggagtcatattgaactacctttaaaagacacgcatgcatgcacatctttcaatggatgtaatttgtaacaagatttaaaacaaacttaaaagtgaagtttacaagtaaaataatagtcaatttacttgtttctcttaccttacaggatttcctttggtaaaggaaattgcaaagtggttttaggatgcacactgataggtttgggcattagatcgaacattagaaacatcccaggtttcccctgcataaccattgttcatttattgacttatccttattaaacatcctccttggagaggtctcttgtagagcctacattatctctgtagtcaactttggttttatcagtttttaaattccttgagtctcaactatgcaagcaggaaaggccaatcagattccagagtgaatcttcttttatgtcccatgtccccttaatctaaccctgtcccatgtgactcagaaacaccaaaagagagtgagtaaatttttctttttttttttctgttgaactccagtggtctaatcagccaggattatgcggacaatcactggaggattccagagctccagattagaactagacgcttcactgaggaccgactgtgtgatgtgtgtgtgtgtgtgtgttttgtagttataaactcagcttctaacaaataagagtgagcagcatctaggataatatatcgtactgctagaatttctaatcttttcttacggagagttgtatagcagtgaaatcctacttacaatctttttctttgtcattgttaacattaacctttcatgtattgataaagtataaaagactgcaaataaatgcaaaaaggaccccacatagtacacgtcaaatatttggaatgaccataggttaaatgacttttgaaggtttataatttgaatatgtagcttgacatggggttggcaaggaggggaaaaatgaagtgggcatttaaaaatggagtttagtattgcttttaaaaagtacagctaaagtatttactgcaagtcagtgacagactgggcccctgtctgggttctcaacccacatggaaaggaaataaatgttcgtgacataaacgtttagaatcagtagtaacgagaagtagaagccgggccagtaccaaaactaagaaaaaaatatgataaggttaggaaatcgtccttaccaaccttaaggttaacgttgaccttaatcatccttaagaccaggatgactccagtaaatgacaacatcactattttatataagaattatgtttaaaataaatattttcacaagcacacacaggggaaatgtctacctctcgtaaacactgaagagtagagtgttttcctagaatgagagaagaggattccatggagtttcctcttggaaagacaggggtgaagtaagtattcatgctgcgtgcccgtgcttgagcaacctgcatgcacatgaaggaagtgcttctgcttcggaagtctgggcctggctcctagcctccgtctgctttcctccctctagtcttcgctcccactgtacagaagagcctgtgacagatgcaggacaatccacgagcacacacggagagatataaagactgctgagttttctctcctcttctccgtgcagcccagactggcctcaaacttaaagggcagaggttacaggcatgtgacaccaactttacccctctcggtcttctaaaaatctgtcgcacattatagactgtactatttaaaataacagaataaaaatagaaaacacacaagatatccataaagtatggtaggacgtagaatatactgtcaaatgaacccaagaatgtaaatataattcttccttcaaattctgggcagttggatccccaggcctgaacaggggagggtggagagtttgggatgaatatatccatacaggtgcacacagacactgggtgggaaggccagtgacaaggaaagagctcttctggcatcagaagtgcaggcaaatgggtttggctttgtcctcctatttcccctctcagctcctgttcctgttttcaaatgcaaattagagtgctctcttatcactgggctcccaggtctcctagactgagtagctgtgttgtacatgggattgatacatcaacgcagtggaaggcaaatgtgtctttagcttcaagaccagcgcatcactgtgttccattaagctaggcatgctctactgacagatgctgggaccactggggcagtgtgggcatctctccaggaatctccagcttgatgggccaagtcactatgctggagtgtgggtctctgatagcagcttctagagagtatcggtttgaatcagctctcagcagggtttctcagacaataccatgctatagaaagactggctaggatgcgtctccacccggggcttcagaatttaccatagaagcttttcatacttgaaaaaaacattcatcctttggttttcaaatgagaaggttttgtttttaaagaatgcatcctttaagaactttattcttttccctgtaaatcttttctgcctcttcgagtttactttctttcctttttcttcttctctttcttctttgtcccctcaaattgccctaacttgaacttttatgtattgcttcattttatatgcctcacaaacgtggacaactttgggtttgttttgtttgttatcctctcgttggctttgaacagcttctaaggcttgctgcagcgggacacagtggtgttctgactacagagtgcttagtgggcacaggtcctctgtggtaaacagatggggagtttagtgtcgagctttgctcctctattggcgagctgcttgagaggggattatatgataaaccaacgaaaggactgtacaaagagaagaacttccactgggcgaaaatgtggcagccaatatgggatgtttcatcccaggatgagaaagctctgtgtgcccctctgtggactgatatttagtggttggtttagaaacagtttgtatttcatccaagggaaaccactgtgagtaagctgtcttgcctcgaacatgaacaggcagtctgtctgtctgtctgtctgtctgtctgtctgtctctctgcctctgtctctctgtctgtctctcactgtctctctcttcctccctccctcctcccctccctcccacagacattgaaacacaaatgcttaaaatacattcttcgcaaagcccagtaacttattaaccagcacaggtgtagccctcataaaagctactccacttctcctgaggctgctaggaatgaaattttcatctcacacataacattttacatttgtgtaaaatataaaatataggtgttatatttagcattttacagatgtctcgaaggcataagtatttagaggagcttgccttttaatgacactgtttccccctctctggagtctggctgccttatgtgttggttaaacttattggcccttctctctagacttcctggcttaggatcctaaattggctttcacttattattagtgtgtgtgtgtgttagtgtgtgtgtgcatgtgtgagtacgtgtgcatgtggtgtgggtaggtgtgtgcatgtatggttttagagatgtgtgtgtgtgtgcacgctcgtactggtgaggctcagtctggtatagtcagagtacccactattttggtgctttcccgtctcaccctggactctcctacccagtagtcccttgagactgggttcttcgtaggccatttggtcacagtctgagtatcagtgtttaaaattttctggaaaattaaacaaacatacagtctgtgttctttaaattgtcttttgaatcacacttagatgaggacagagaggcaggctttttataaggatggatattaaggtttaagaacgctggcttccgttcattttatgatgtcgtttatacttaaagatgggatattattccagataaagacttaggatgagtcatcttaaaacatttggggggctccagccatgggagactacagccctgtggccattccgtttcaagcatttggagtagtattctgcacattatgagacctttagcattttatcatgaaggaagctttgtgttcagtgcgcttgtctaactacaggcttatatcgggactctatccatattcagtataggctgagctgtggtgtttgctaggtcagatctaataaatgtgcttttgatttctgagattcccctcagcttaggatgggcgtatccacaacactaccttaagtcccgaaacatctgtatacgtgtctgccttagacaaccctgccttttgccatatctgtgtgggtttggtctgcctctctgtttctggggacagtcaagaaggtacacttaagccagctagaataaagagggggtcctcaagtgtgggggtgagagtcccagacattcctatacttgggttgtcccgctttgggagtcactctctgtgtccaaatgtgtccttttgtctttgctttgttggattcagtgtttctgtgcctgagctttgttccaacctgactttggtttctctgtgcaacttttcttcattgctgggctgtcgcttttcttgctagccttacattgtgtgtttcctttccattggaaaggcttagtttatttcttaaactcagactcctggctctgttacatgtcaaggatggtccttgtaatcttgcagacttcctggtgaagtgtggataaacattcagtttccatatgtctagtcttcggaaaatgtcctttgttaaatatgaacaggcaagcaaatttacagatgatgaagtctctaagatgtcatatgccttgaatttgttctttaaagaaacatggtaaattaatctttttttaaataacttacagctaatctttgctaattatgcttctaatttcacttgagaacaatgaaataaaaaactgtctttggattttcacagaagtaaatttatggtaaaggaaaaatgttttctttcttgagttattttgctacatctcaagccttacacgtgttaaagtattaaaattcagaagtttccatgaacgttaaaccacttactaatctgcgcaaccattttcttttccttttgagtatccatttagatgtaactatgccttactggtaaacgcatatagataccattgtaactcagcctttttaatctatacactagtaacccttttaacagtgagattcatacttggatttgaagaatacctgtataactgagtagacacccaggttagaccttctcgtttttatcaacagagttgactcctgaggagagagcccagaagatcgccaaagccatgcgcaagcagtcttctgaagtccgagagaagtgggaaaatctaaatgctgtcactagcaactggcaaaagcaagtagggaaggcgttagagaaactccgagacctgcagggagctatggacgacctggacgcagacatgaaggaggtggaggctgtgcggaatggctggaagcccgtgggagacctgcttatagactccctgcaggatcacatcgagaaaaccctggtcagcaccactgcctttgacaaagaatatttaagaaatgtattcttgttgttgcagagaacacatataaggagacccacatataagggattcttataagctggtaccacttcagctccccacctaaatcaggaattatggcagatgttttccatatataaccccctcaaaaaaacaagaccccaccaagatggctttatgataatttagtttgtttaaacattttaaaaattccattcaagtatccctaaatagtgtagattaggcttaaccatttaaaacaagacaaaacctctcacaaactttttaagttcaatttgtttctagatatgccttccatttcatttacttttgtttcctattcatttgtttttttttttatattgtttattttgtaatgattcctgcagcctagatttaatagaatcgtgcccatgtggtacagcctacaggtctgtctcctagaaactggtggttggatttacaggtttaataaaaaaacaaactgccttagtgggaattctcatctataatttctatcttattgtctaagtaagtgaaaaataaatttggttataaattccatttgtaatcaggagttgcccgaggttaaggatattagttctatggtgtaaagcagctttgcttactcattctacattttcaggatgtgtgtgtgtgtgtgtgtgtgtgtgtgtgtgtgtgtgtatgggtgggtgggtgggtgggggagtaacagaatttaggcagcagaagacacagagagaaactttagagaaagcaatgtttgtatagacatgaatcacgccagagggtgagcactgagacaatcagaagggatgcatccaacattatccatcatgcatggagttttcattgcaaaaggtacacacatcctgtgttcatagacaccgggtaacagtcttcctttatatgagtgtggctgagtggaaaggcaagctctgggaaattaacttaatgctcaggccagttacaggagtgagagcatctgtgtgtgtagacaggggagtagtgacagccagcatttcttaaagctgaattgttcttagtcatttcacgtggttatctcgtttaatccacacactgtcaacacggtaaggattatttcctgaaggcaaaactgcagttgtccaagcccacacagctagttaggtttagggtctctgtgatacttttttggtttttttggttttttttaattgtccttctctttcactgcagagatctaatgttaaacacagccttgaccaaccctttgaatttaaaccctctaaaattcaaacacttttaaacttaaaacttttaaatgtaaaacaaatgttaacaaagaatatagtgttctccatttctgatgatagatatgcatctgcctactctataaattaagcagacctcttcaagaacttagagcattctgaaaaacatttctctggatacatgtgaatttaacatagtctaagaaaaaaataatcattcatttatcagtgcatctttatcaaatattggacactggatttttcctacttgtttatcttaggtagtgtgggttgtacttgggccttgtgtattcgggttaatgcagcgccactcagctgggtgcaaagccttctttttactttttattttgatacaagatcctgctagggtgtgtgggctagtcttgaactcactccatagccccaatagcccttaatcttgcaggctttctgcctcaccctcccatgtagctgttattacaggcctttgacatcaaatctggcttaactaattttaaagcctaaaaagtctaaatacaattagtatcaaaaaaaaaaaaaaacccaacaaccttaatacctccggatttgagtgggaacttacctttttgaatttgaaagtatcacatgataactggggaaaattagtgtggaaaaaaataaaaatttgtatctgcagaaaagaccaaagagtttgagaattggcagtcttactaaattaaaggactgacttgcctctccagccaaattcttttgttcaaatctacttaagtgggaagcttaaaaaaaaaaaagcaaaaacacagaagcaaatagtctaatgggaaagaataaattggattaaattacttttatatctttagaggtaaaaattaaaaattcaagtctcactgaatcaaatcaagtaaactcaatgtgtgtaatagtttacattttccgtaaagtatatcccctctcttactgtaggcatatagagaggtaaaacctaaatactagaagttgcaaaatattagttaatatgtcaaagctggaaataaaatcctcagaaataagtaaataatttcagttgctaaagttgtctttaataatgctggttttttgtttttttttttttttttgcatatataccttgtggtaccagacgggtttgagacacacacctgccaacagtctaatgagcacctttgatagtagcagatgtttctgtttttatagcagtgagggctacgtagacttgtattctcttataggaaaatacagtcaaaacatgatgaattagttctttatacaagaacacatggcagttctgaaagccatttataactccatttatttcaagccccaatttggaaactcttaaaaggcaaaagataaacttccttgatagaaagtttcctcattgccataaaaacaccttgccataaaagtgcaaacagagccagaaagactttcctgttaaagctctgtcaatgtttcacctatgacttgtaatagaaacaaaacaaaacaaaaataggatttttttttacacagtagaaatataagcttctttattgttccttaaaattaaaaaaaaatcctgtcctgaaattatgcatgaagttataatcaagttctaaaacacctttctaaatttctaaatcaccatctgttgatataaaactggttgttatttaaaattaaaaacctatcaaatagcatgttaactttaaaattttaatatctaaaactaaaaggatattgattttaaaatatggatccagttttaaggtctttgaatttatctgtgaaagagaatattaatataccaagctaaaaaatcccagttaaaaactctagaaacatttgaggtctagcatgtgtgttcagctgtgtctgggagaatctgacttgtttcagagtccacgctgataaactctgtgtccttccctctgtctcccacacctgtattatttgttaatcctttgcacctgtcatgcctgtcactatgtcactgtatgccccataaccagatttatacattgtgcacattgcccaattacattacaatctgcgtgtgcattttggaccatcttcagatgtctggcatcggcagggatagacaaaactgactgcaaatcaaaattctttctctttccatgttgtagcaggacatgtgtcctttggggcttcctttcttctgacttcttttgatacagtggtatctactgaggttggaaatagatcttattaaacacctggtgactcccatgtctacaaattcaaacagcattcataccctgctctctctgatgcctgtattttacatgttggcttctggctctcagtctcttctcatgtggtttgttcttcaactctcctttgaacttaaccgcatgcctttaggcagagtcaagaacttgaaaacactaaagtatattccctgtttaccattggaaatatttgattcctgaatattgggttttagcaataattataattcaggataggttttaggagaggcaaaattttatccctgccatcttggaaggctgtttatctgtcctaaaatctaacataagaccaaggaacaaaggaggtacattccattccttactataaaaaagcatcagaaagacagcagatgagtgcgtgcgtgcgtgtgtgtgtgtgtgtgtgtgtgtgtgtgtgtgcgcgcgcacgtgcgcgcaggttctaaatgtaagaaagtgtcccctcccaagcagcttcttccatggggcaggaggaatgtgaatgctaagggataggaactgaaatctgaggtgtccagcagtggggttggaatagctctgaactgtcagaatagctatgtcatgacatgtgacacgtgtgtggtttgtacgttttgatatgttggctgaaagtcatagctgggttagtgacaccgaacagaaaatccaggagtgctggggaaaggcctccaggcaaggctgccgagggccatctcctcacggaggcatttcagcatccagtgggatgtagagaaagacttgtcagagaaagcgaaccagtgctttagaagacaggtggaattcagcggagaactgaggccatgactatatcattatgctgtttgctctcattggctttaaagtctagcttcccttttcatatgcttgcccaggacatatactttttacctgggtctattcttcacccagaggcagcagttcaatactgagactcagctatagattttccatgatgctctgctcttcctgcccatcccctaagcacagactgtgatcctagcgggttcagggagatacagaacttttctctcctatccaataactatagcttagtagtgaggaaagctacttttactcgacccctaatctaagcatgactgagatcaagtcaacttgttgtgtctggtgaaataaaggagtaaggcagccatgcttcaataaaaacagcaaatggaccatgcaacagtaatcctgtggtttgcatattatagactagacagaaatgtttagtgtcttaaatgagttcacaacttgagtttgtctcattgcccacatactttaaggctcagggagtctctggctgtataggttattacaggtctgatccagtcagctgctgttaagtagtgtctctacttgacagcatcactatggccttcctatggtcttcactaagaagatggcaactctggcttttgagaaagtctcttctggcgacattctaaaataatctgttttctaccaggcgtttagagaagaaattgcaccaatcaacttaaaagtaaaaacaatgaatgacctgtccagtcagctgtctccacttgacttgcatccatctctaaagatgtctcgccagctggatgaccttaatatgcgatggaaacttctacaggtatcggcttagccccttcagaatgctatctaacactgcataaagaatacagaacaggaatagaaatgtcaggctatacaattgttgatttgtatttagtttcttagtgtaacaattctttgtggggttttttttttaaacctgaaaaacacacattaggatgtacacaaacagaaacactcagatggtctttaaaactcacctcagttgtaaactacatattatctcgtctctctctttactgagggtgtttgataataaatttagtaggcaggtacttgtctttctatatcttgaaaccaagagcatcatttagttatgagtatggatttcttggttataatttatatttacactgtatataatacttgtaaaaaatacacaaaagccagtaagttgcagcaatgataacctggagtcagccacaggatcctttgtcctgttgtaacctgtaaagaaatcattgtcttactttcattatgtgttctttctcttttgaaaaagttacaaagcttttcttcgttttctttacattgttcactgtgcaggagttttctttctgtttacagaaagcacacctgcacttagtgtctagatccgaccttcccaaggcaattgtttcagtggctcctgaccctacttgtagactccagattagctgagccaggactcatgagtgttccaggtctaagcattggctgactactgtccatgccaggcagcagttcatggtacaaagggtctgggacacatttgctctccacctcctatcagtcaaagcagctatgcctttttgctgaaaatccgcaggggaggctgtaactagaagagtaatagtaaataattctgactaatttctctacaatataacatgtagtaatacaaatgtgcagttccgtcattttatttgaaaagtactgtacattttaggttataatatattcttacattatccaacatcaaaatgcataaggaggtgactgagattggacttggtatgtaaatgcatttgtaaacaccagaatctgtccctagcaactcacttggtagaggaaagggccaccttctaaaagatgctttgtgacgcctgtgtcctgaccacccgcacgcctctccatgtagaatacatgaacgttaatttttttttttaatttaatgttacatgttttcttaatgaagttgaaagtgtgagatgtgaatattccatatgtgacgatctttcctatccttgtgaaggatgtcaataatccgggattagtcaggctaagcatattaaatttgtaagtgctcacagagatgtctgaacctaattctttttgcttctgtcccatctctctgcatcgttatcattcattatactcatttgaagattgcttttctggtctttcttgatttccttttgctttgcctctgttatcctcatctctacagatgtcagatgtattgttagatttgatgggaacattcttccacctttatctttgatgttggtagctactagggttcaaatatcagtcctggataagcaaagacaaatccctgttagcagacagtgctgttaaatttcaggactagcagcttacttataaaatatgacatttgagcatctctcataatgaataaagtacactctgatgcaatttatgtagctgaccaggagaaagctgagatgcccagtgagctaggcagatgcaagttttatttacagtgtgctgaaaatgaaattgttcattcaaatggaacagctcaccaccactgcacagacaaataacagggccagggaaatggaaatgtcagaaggcagtatgcaattgttgttcatttgcatttggtttcataactggttttgtcctgtggcacggtaacaatagaatccacactaacaaccatagaagggagtcatggctgggatgcactggtgacacattgcagcctggagcagggattctcagaggctcctctttcctttggtaaagaccatcagatgcaaacttgtagggaaatcagaagatgtttcacacccagcttccagttttctctcttctgtcatctcatatactcatttatctatctcccatctgtctgcctgcctaccttcctacctacttatcaatatgcttatcaacctgtgtaaccatctaggatcatctgcttaactgcctgtctacccatctatccatctgtttatgtctttatctttagagttctctaagctccatttcctacacattctctgtggtacttttatcctctttttttataaaagaggcatggataagggctcctcccatggccacatcttaagctgtcttagaagcatgcttcctgccaccaagttggggagaacagttttcaggcataaagatgggctccgatggccaaggcatgaatattcactttgttctgactagttgtgtcctctggcccttccttgtgtcttgctttcttcatatctaaaatgataaccacaattaatattaagctaatgtggttattgtatagattgaaagttcatatagatagtttagaatgatctctgactttctttaccattatttaatgtcagaagttgattttcatgctgccgcattaataagaagagaagttttctgcccaaacagtaatgaattgatagagcaacagcattacttgataaagtaattacgtcaaggatgttatgaaaaccattgtcttgaagtcagtcgtttcatctggcgtgtgcttgtgtgcaggtttccgtggacgatcgccttaagcagctccaggaagcccacagagattttgggccatcttctcaacactttctgtccagtaagtatcaataaatttgagtgttcttgcttaacttgaatgaatttgcaaattcgttcagttctgcccaagaagctctatctttgctctaactatactttaaattaagagaacatgttcatgaaatattacttattgcttatgtaataaatgcagtatgtaaattggtaaatattcaaaggaaaacaaaagtaaatttgtatctagatatgttttctcatttaaacattggttatgataacatatatggtatttgtcatgcaaagcttatgaatgtctcataccaaaaatttatgctgtaaggttttttaaccagtttatttcaattctctctctatatatgtatacttagttttttttttaaagcttcacatgaattttaattcactatataaatacttaaatgagaaaatgttggtttactaagctcaaggtagtcatctcatggacaaatgttatacattaagtgttgcaccaaggtaggtttaatggaacatcctccaactggaacttgtaattttatgtgcacttcatgaagtcttagggaaataattttgagccctgttttatttatcatccacttctgatgatacttaagaatgctgaattttgaaactcccaaactgattttaaatgttaacattgtcttttactagacctgagaatttttgaaaattaatttcttgatctctgcatacctatttcctcagattgcctcaagaatgaaattcagtagtctatcctgttagaccaagcacgcaagccacaccttggcaaagatgctttcagcacatattaatgccttttctttaatttcctatgggaagtatatggaaaaaaaacaagttgtgtaatttaattaaatttaagtaaattttaagctcaaggccaagaatacttctcaattatggaaacttattttctctgaaaccacagagaaagggtcagggtttatttacttttgtattcttgtgaagtcacatttgtcattttctgtcccctacctctaagacttacccatcttcagttcctaagctgagcctgtgggtgtttgtctctgagtgaggtatagccctttgtggtgggtaagggcggacctttttttttaatgcttaacatatggatagcactattgttgaaataaatagcctcttattatactcattagatattaagtattatagatttctaaaccctatagaataactaagaccaaattgaagaagcatttgtaaataatggagactctgtagttcaaatgatcagtttatctgctaatattgatggagccctacctttccacctggcaacctctcccatggaaatctagttcatgtttcttcagtcataaagcactgcagaattgcaatacactacatggtgttcaagcacgtggtcttcaaccgacagtccaagaagcttggttattcgaatcaaaataattactgaataaatgaagaagtgtgagaaaacttgcaattagtacatttaataattcttattccttgctgcttacggtctttggcttgattgtgttctttggactttacccatgcttgttaaaaagcaagttccatgaggcacacaataaaacctgacctatcagcctggtgccaccatgaagtgaggctagctcttatgagaagtttagcatacctgagtcttcatttctgtgtctgtttgtgaatatctgtggacacagttgtaaagatgagtgcttgcctttgatcaagaccagaacaattgttaaggaggaagtttgctgagctagtttttggaaaggtgttgtagtatctgaactacaccattttgaaaaggactttgggcagcttcttcttttttaggggaggggggctcatatcacaggactctctctctctctctctctctctctctctctctcattatttatttattttatgtatatgagtacactgttactctcttcagacgcaccagttgagggcattgattcccattacagatggttgtgagccatcatctggttgctgagactagagctcaggacgtctggaagagcgggcagtgctcttagacagtgagccatctctccagcccttgggcagctatttttaactctgcgtatttagcttcttctccattatactggacattggtgtgtggatcttgctgcattttcaaaataaagtttggatttgggatgcttggcaaagtttagaatgttgcatatttgcaagatatcaatgtgccaagaaattatgaaaaaatagtgacgtgtctatatgaaggtctagagatagttgtaaactttcattttaatttacctggtaccttgcttagcaaaattcttctggttctaaattcatgtggctactctacttaaataaacatttaactaattgatttactaaagcactaatgtaatgtatctttacaagtaatcagtaaacagaatttcaaaaaggaaagaacttccattaaaaggcatcatatctcaatcgtggcaaacatctcaaacatactacaaacatggaaaactgttttttaaatactgcggatcaaaataaatatctgatatttttcttagatgatctgcttgcttcttaaaaaaccccttgcctatttttatgttgaattttctttctaaaaccttcttataattaaatttgcttgagtgccatctgttcataatagctgagcctatgaatatggtgcaaagtgaagaatactattagtgatctagaaattccatcttgggaactgtcattttaaatctgaatgtacagcatatagggagcatgctttgcagatggcactgtgttctgtgttgcaatgtttatgaacaataacctgattttgtgaaagtgttttcattgttagggtctgacagaatcggctctggacgttgagtcttggttcttttcctcacttcacatgaagctttaaagctgtgctgcttggcctcgtgcttttcttaattgcaggaatccagctcagagccagaacgggtccctcaagagttgctccgaaatgtgttcatttgttttacattaaggtgtaaggcttgctgcttccaataacttccttttgtttcctcagcttcagtccagctgccgtggcagagatccatttcacataataaagtgccctattacatcaagtaagtccacttcagttctcttttatgtaccaagaaaataaagttttaccgaataattgaagagcgctcctgctcccctatgtaacttgttttgttgttggtcatttttgtttgtttgtttgttctgagacagggtctccctatgtagtcctggctggcctggaacttattatgaagctaggttggccttgaacgcagggagatccccacccccacccccacccccagcctttgccttccaagtgctgggaataaagctgtgtaccggacccagagggtctgcggcacaaacccagctccctggacgttttaatccagaattcaatccgcttaccaagaggaagatgtgcatgataataatgggaagaaattaattttaagatcagcgagttgtccttccttaggtctttctggccttggggacaggtcactgagttgctattttatcatcatcttcatcttcctctttctcctcatcataaggttttttcagcctagtttctctctcctgttacttcttatgtgacatattctgacccttatctagtttgcacaccatctcaggatgctggtcctttacttactgtatactttgtcccagaaaagaatgatgaagcactcctctgttatctctggaaggggaggttagtgaagcagttgctttacaacgcaatccagcactaagcattgtcatcgaccctattatgtattaggagaactagattgtaattctgagagtgcacactgagtatcaaaagacagctgtggctcacattagctgtgtggccttgggtgagttgaataaaaaaaagtctctgtgccaagatctctttgtatggtgtctgaaactaactgtggtctcttgaaaatcaaagtgtgttctcttaaaaatcctatttcaatattaattgactttcggatctttgtttggaaaaagcttgtgaaaccaatatttgttgaataggacattttaatatgcccttccttctatcctgaaatccattcttatttttaaaacaaactggtcatcatctataaaaatataagcagtatgtgttacattgtcttgtgagaattgaactcttttgttcatagacagcatttggtatattgagttgtgatggattctagaatgaggcatcaaggcaattgatgagtgtgtcatttctacagacaggaatggaaaggactccaagactgggtgagatgatttgtcttggttgaaagcagttgtggccatctaattaaaattttaaaatttcttagctgttttacattttaatttcaattaataataactttagcaatggtattgaagagctttagtctgcttgggtaaatatttacctgaatcaaataataaggctttagttataaatctgagacagaataagccctccccttaaagaagtccaatcctaacccctgggactttgactcagttctctttatacataacagtgttgacaacaacatttagcaacagtctccaggttgtaggctaccataggcagattatcctgatgtcagtgaaatcatgtgagccttttaaaaggaagaaagcagctgaggagaagccagactggaagagggaaatacagatgcaactttgaaaatggaggaagtggaatgtccttctgggaatagagacaattggaagaagctgggaaagaaggggtgtggtccttatagacctcccagaagcatccatgccgtgctcaatgctagcctttggaagctttttgtgtggtagcattaaaaaatgagtatacatacagtcccaagtttagaaatccataaagattgattaaaatgaattcatggatagtttgacctagactcctctataatcagatattttaaaatgtaaacgcgatctagtaaaacagaatttgttttcactagatagagaaaattggaaatggcttactcttttcctttgttttgtttttgtgggggtcgggaagacatctacagttcatttcacacacacacacacacacacacacacacacacacacacacacacacacttccattagctgaagaatttccatttgtatacatcagtaatagatgacgaagaattaagcagttggaccttgtctaacccctggagtttatgttgcggcacagtggaagagtgttcttgctcagtcagtcaattctcatggagagaaaacacgtgggagcaaagttggcctatccgacatcttattgcttgctcataaccaacactggaaaaataatatataaaacagcactggcaattctttaattctttaatgtttaaaggttaagcttcctataatgttttctatatcttagtaaatatcagattttcttttctctttttagtaattattacttggcagtttcatacatacattctggtaactgctcatctcctcactctctcctgtccttttcccacctccattaatcccccctcctaccaagagctcctcttcttgctttcttgtcttttgctttgttttgtttgtactttgtgcctcagatcctccatggctacccacctggaaatgggtcattttcttaaatacatacagatttagcgttaaatgtcttttatggtattcacaatttagagcaaagtctccgggttctataaaattcactaatctggcagtttttcattgtttactctgttatgcaactttccagtttatttccccatagaaaaaggaacattaaacttgggaggtagagtttagagtgccagttttcacttagaattgttacgaaaacaagagtcaatccttgggtaaattcataagcaagtaaatgatgaatgaaagaacttttaatgtgtatttcctcttgcatgtctgtacatataagtagaaaaaaatgtttaaaacctacttagcattattgtcacgctattagaatttcctggggcaaagtgagtgaattaatttagctgtcagaaaatagtattcaagtagaaattttaagcttgcattttcgtacatgtaatgctggagtgcagcaagagacttaaggagaggtgaaacttattttggggttatatcttaattgtataggtgaattaaaaatataggatacagatcgagatggcccttcattagcgttttgaagttcatggtagtgagaggcatgtctttgaagagcatcaggatgtagatgtgaactgtgagaacatgtctatctggcatgactctgttactgcctgtgatagttgggtgcctggtgcactaacaaatgccagagaggaataaataaggtcataaagaaaaacaggtttaatcaaaatgctgagttgtggagcctggtcctaatggctacatctacaaacactccctcacctaagactcagggaatattgcagaagaggtggtggaaagattgtaagagccagaggggatcagggagtttactctgagactgtgtttcctagtaacattggaagctacacccataaagtctcactgacctatctgcccaaacaggagcgcaaggatgacatcagtggatgccagcctgactggaggaaaatccacaggtcctcaacactggacaaaaaactataggcgactgaagacggctgggagtaggcgaggtggccttccccagtgaagagaataccaattggttgcctagggccttacaaacatacatacaaacaaacatttagcagcttatactttggagtgtgtgtgtgtgtgtgtgtgtgtgtgtgtgtgtggtatagagcatacaataacaaatagtgaggatggcagtgttgtttttccctaaccaagggtagggaagctgggctattataggaaaccctaatacccagccagacaacaaaggggaagctcgtgaaggtgtttctctaccagcaacagcttaagtgataaggacaacttatttttaaggattcttgaaagttcaaactagaaccaattgaatctatagcaatggtttaatgcccagtacaagaaaaatatgttaccctctacatctctccctacaacacatttcctccttttcccttgtccaaaggacagattatatctctgagctcctgatttgtaagtagaggcccacaggacacactgagtccctttaaaggggaaggctgtgtatgtgtatgtgtgtgttttgttttgtttgtttgttttgcgtcccagggacaaggcaaaaggagatggcttccagcagtgttgatgggtggtccccgttcccttatttgaggatgagagggaggtggagatattaggtggcagttgggggtgccttattagttctggtgcccctgtatctattgaggtagtgcacatgtttattcttctaatcaatctttagtgccctgtagcaaagtgtcgcctgcccctccccttaccccaggttcattccaccctgaaaattaattctgctggtcctttaaagccaagaaccaacacagcttctcgcacagttctataccaactattctgtcatccctgcccacagtattgactttctgaatttagggatgtagtgaacctacttatagctttgcctttggacttgctcctgaatctcaaattatcttaaataaactgtacagtcaaatccagttctttgctgtttgtagtttgtattttcttcctcatgtcctcattaccatgaggagccaggacatttttagggttgactctggccctttacaatctgtctcacttgcatgaggagtaacactctctgttatggaatgttgactgtcaagccctctccttaactctgtgagtttctaattccattccctcccaaaaaatataatcttaaatttcctgcctttaaaagtccaaaagacaaaatgctgtgacgaggttcgagaagttttctattgcctgaggatcatggggttactgttaggcttgctggacagtgccttgctgccccagcagaccctcagcctatgcaatcctgttcacagtgaggactcaagttatgttggtgagcgctggggtactggagtttcttcttatggggcacactcggcgaaaccaaaaattgagatgatgacggtggcaaataccatcttttagggctttgagactgtatcacttggatgactggcatcacttgggactaacagcgtttgtttcactatatagtttaggggcctctaaaaaattgattggttattggattactaatccaacttttataaaccatatttaaacaattgttacaataatctcaaggcttatgttttatcttaatcaggtttattatctgtgtttttttcttatcatttcttatcttctgtcctattacataacatccttaggaaatgtcttatcccttaagttagggcttttccactgggaacgttgtggcgtgttgacagttttgataagaccagtttagatggaggagaaatttaggagccaaaggcaaattgattgagtagataatgtgacagcaggaagtttaactattgcataatagatggtaatggtaagttttgtttgtggagaagcgggaaaagggtatgtttaaggttatggtgtgtgtgtgtgtgtgtgtgtgtgtgtgtgtgtgtgtgtgtgtgtgtgtgtgtttggcaggagaattgagcagatcagttttattgtgagatgagctgataatatagcacatttttttccctttgaatcattggtggggaattggccactgctggtatcagtgactttcaattgagggtggcaaggaaggcgggtagaagagagaacgttgtggatttggaagtagggagatggaatctatcagtttatagtttttcaatgaagtgtgagacaaaggcaagatagtatcagggaagggaacttccttttgggtaagcaaggagaaggaggaaggaaggggtgtgtgatcttggactttagggacactagttcacttgtttgtaggcaggcatttgaagcttggaatcaaatgtttaaagtagaaacagtctgtatgtagactgtttttttgggtttttttgttttttcttctccatattcaggcgcagctgctttgattcagaaacggcaaagtaattgagtagatccaggcccgagatttgccaggggtaagggggaaggcagagtgataaaagttgtttgtagtgattataatgatggactgtgggctcaaatctggatggattcatcaagaaatatttaaaaacgttaattctgcaaatccacttccatatcaagagctcaggcttaaatcagaccatctgtgttcagatctccatactgctcctggcccgaggccttcagtgagttatctaagtgccttctctccactgtgccctcccacatctgaaaacagccatcagagtcccctaagtcacgggcagcatcataacgtggactgagcttttcacatacagaaaagtccaagctgctcactggaatattaggctaatacctaatattacttagtaaaacttgattttcaaaatgtatagaatatgtaagccatgccttaatgtaatattatcctattacttaatatccctcagcagaagtttgctcagaaatccatatatttcctatttgcctatcaaaaaggacaccaaagctgaactgtgcagttggttgcttcatggcctctctgcagtgctaatttcgttcgtttgaatgctttcctgtatgatctgcattttgctttctatggcatatcaaaataaatgtaagtcccagggtaccctgtagacttttcctcatcaaaggcttcaacagttttgctattgtttcccctatgaaggcaaacccttggatggaaggccgtcctggtgagaggtcacttctcacactatcctttgcttcaagagattttttgaacctaaatattcatttggatatttaaattttaattttattccgggacaccttcctggatcaggtacaattttttgaagtaagattttggtagcagcactccagtgtggcagaatagtttctccggggtgctgtggttaacttctccccctaccgggccttgggattgcttggaagataagaagattgcctctgttgttttgagggaagacattcctttgcttctgtcttggttgcctgctctaggcaagctggaagttttatggcaagggttccctgctctagggatcctgcagctgctcatatacttagcttttacatctcatatggattgtgttctgatcctctttctccacttaaaaaggagagaaagaaagagagagagagagggagggaggaaggaaagaaggaaggaaggaaggaaggaaggaaggaaggaaggaaggaaggaaggaagaaagaaagaaagaaagaaagaaagaaagaaagaaagaaagaaagaaagaaagaaagagagaggaagaaagaaagggagaaagaaagacatccccccccccaaattgttgttgtgtaacccacagctttactttgtaaccagaggctgtgtttactttgagcctttgcagttctgcctaatgaatcaactagtattgaattcacaaaggagcctccctgctcctccctccatctgcttgccaaatgtgtgtgttccttaggctcccaggatgccgagccatcagcgcagaaccattagcagcctgctttggaatcctcaattgtttgcctaacttgccagtggtattttgcccttgtggcaatgtaggattgtccaaggggaaggtccacatttgtagttctagagaaggcatacataatatttaagcctgaagtctgattctgcattgctgagagctctagtttggcccgtgagctttggtttgtcctggtatctttggatgagatgggtatctttggacaatagtgctgtgaccaggactgaaattgcttggaggggaaaaaagagagagagagagagagagagagagagagagagagaaaactatcaactgagtcttagttgtttgagattaggaacccatgatagcagcatgggactgtactacattttcactaaactgttctttaaatcttactggtggctgatagatgtgtttctgccaagctcatggctatactgtgaacagccattcttttaggccagacatcttctacatgcccatgatctttaaggcagtatgggtagttagaggatagagtggttttgttgatgttcaggtcaagtggaaatacttgtccctttgtactggagctaagcatgagaggatgggaggcaaacagctttccagtgggttctaaaacctattccctccatagaactattcgatttgagattcttaggacgtcttactgactcagttcaagggcataggacgtcttactgactcagttcaaaagtaagctttatttatttatttatttatttatttatttatttatttattgaaacccactttgaattaccagggcattctattacccaagtatacaaaataatgattctgttccttgcccagcaatgcaagcgacttttctggtgcatcatgtaagttataaaagcagtgatttctcttaaatttatttttatgaatattctaatatcatctctcatggtctgtgctatttcacatagcttgctaaacagtttcttaagaattaagggtcatctgagaagtcttttgagaaccattagctgttattgctttgttatggcctagataatggactgcaaactatttttaaatataaggctactaaatcatcaaagttaactcatattaactcattattaatattatcacattgattcatattccccccacacatgcttacactcacacacatatgtttgcatgctaacagtcacacacacatacaaacatgcccatgcacacatatatgcacacacctaatttgtgacccactgtaatttgttttacaatctattcttttaagatttccaagtaacatatatgaattatagcaataaaataaaggtgtgtttttcaaataaagaatagggatcatacgtaaaattatccacctccaaaaataatagtactcgttattgagtaaaactaggaagatggagctagagtttaaaaatcacaagagaaaagcacttagctaaggagaggctggggcctggggttgtgtaaggaaaggagagctagcaggcatgaactagggaggaagagaaccggggttaacaaacagaagagctcaggagatggcaaagtgagcacatgatattcagatttagagtcttcatttctctgctctttagaaatttgattaggacttttaaagtgtggtaactcttcagaatgcagcaactcgtcatagccttctgctgtcaaagcatttactgggaatggaaaaaaaacatcagcctaacaagatggatattattccggaggccacattgatttggccacaccctactctgggtccaagcatccctggcagtcatcccttatgtctgtgtttcagattgtagttgcaattgttttttcgatacagaaggcagaattttgtctatcttttcttaatacagttacacaagcaaaattggttattcatagtgtttttgtatgtatatgtgtctgtgtattgtgcaagtttatgcatgttcccatgtatgtggaaaatgacgagagagagagagagagaatatatgtacatatatggaggtcacaggtcctttattcctctacactttatatattgaggcagggtacctcacttgaacccagagctcaccaaagtctagcttgctagttcactgcagacaccccctgcctctctccgctgtcctggcattatagatgagttccaaacctaccaggattcacagagtacagggctctgaattttcatcctcatatttccttggcaaacattttactcctgaagccatctccccagcccctattattcataacttgaatactgagtaataattgagtactagatttctgagcgatccataatggagtttttttttttttttttttgcctgctttgcaagtctatgtgggattttagaagacgatagcttatattgtattttgtagtgtgttgtttatacttacatttttgttttctccccagccatcaaacacagacaacctgttgggatcatcctaaaatgactgagctcttccaatcccttggtgagtgctgctgtgtttatgagtaggccttagtgagtgctgctgtatttatgagtaggccttagtgagtgctgctgtatttatgagtaggccttagcgagtgttgctgtgtttagtagtgatgaacggccttcatagccaaggactgaatagtcgtaaaaagaaactcagctactcatcttttcttcttgtgtggatgaaaggatcatgctgtggcatgagaagacagtgccccgacatgctacaacaagagtcctgaaatttaaaggtagttgcactcctaaggtaaacacacaaagcaagactcggtgatttggaagtgtaccagccaaaaggacttcattttctgggagagatctgattgttgtaggtcttacctcatcttatagttcagctctgcacactaaaaaaagggaaaacatagtaacaatatagtaacctcaaatttaccgatttaaaccattttgttttctatgtgggaaaattttctcaaattagcttacttaatttttaagtcataaactaaacttattttgacagggggaaaaaaagatttctgtttttagactgtcagtaggcagtgactttcagcttattggtgagatggccttcatcaggttgacagtagtcactgaagtttagtccttgagaaaccgaggcggtgctaagggaggatatggcagcatcctgtgctccactccttcccattttaagaccaggcgcacacacttgtttctcttaaacactgggctctgttgggcactctcccttggtagttgagtctgcagaagaaaagcaagagaaaagtcactgctttgcttgatttagagactgagatgggggaaaagaggcagtgatctttgagttttcttccaactctgtcagtttctgctaacctatctttagggaacagaggaagaaattgtaatattcactggttccaagataggaatgttgattattttcatagatctgcttagaacaaccaaatctgtgaaccaataaaagaagcaaattgatcagggtagacagagcgtagaagaacagcccccatgagtactgggatgagctggcagatgacagaaaactaattgccccagtaagccaatgactctgaaggagaaaccctgttagctgagcagtctggtagtccccagtcatagtggtacctcctgttttcccgcagggcagaacttttccccatgctcattacccccacgggtcatggctgacacacccacagcacaagacaggttctatagaaaagcagtgcaaaattattggatcaaagctttgtgttatgaaagagaagtggaaagtaaggaaatgttttacttctgtatggctctgatgaagtcaggtagtctgatgagacgaggagagatgttctgctggtgaatagaatgaaggagaagccaccttatgtgtccaggttctccccaacttctatgcatattgttcttttcctccaaaggggaggacatgatatgttacttgtagtttcaaatgaggatggaaaaggtcacagtgacctccattttatcactcgtcttggaaaagaggcgtctaagatctgtgatttggtcatggaaagggaatttgagtttcctgtataagattgttttgcagtgtctcccaataaggtatgaacaatcatttgatcatatttttatagattgatgtgaaatttaggaagtttttttttatcatgaactcacacatttttttatgatccaaaataagcaaatatgttcattcttggcattcagtagaagttaaataataagcaggcctttaacttgttctcttttccatttcagctgatctgaataatgtacgtttctctgcctaccgcacagcaatcaaaattcgaaggctgcaaaaagcattatgtcgtgagttatcacactaactgaatcaccttgctttgggaggttgactttgttgttatcattaagacagagacaaatggcgaggctgaggtatttgcagagtcaatctgactttcagtgcccctcattgaaggagttagctgcatttctactcatacttcatgattggtgtcgtcagtgggtactggcaaaaccaatgagcagtgccactcgaattcagagtgcaaaatttatccaaacgcaggaaaagctctttggaaatttatactgccacccagttttaaaagattaagccattgaatcaaagctgtaggttgttgcctagtaagtcctttttgtccactccaaactggaggcttccaagctgtttgactcagtacaatcatgaaagagaaatgcaaagcagtcacattgctgatttctctgggaactaaaaccataaacatgatagaaaattctgttttcctttaaacatgacagaagttatctgtgtcattaatggatttttccctgtggagggcatgctcatgggatattctatggtagtcattctaaccaaaggttctttttatgccgagaatatcaaaaagtgagcagacatgtgtatccttgtaaatagagtattgatttaggctttctggattctgtctttgcttggattattgacctgacccaagcaacatttaagccttgctagatactattatgcaaagtaatatttgcatgtactttaaagattgggagatttggaaaattccatatatgcttgttttctactctttgttaagaactactatctgcctgggtagctcagtgaagttttgaaaactaccctcagaaaaatggtatgttagggtcaaaaattgtgcttaaaaccaatcatgggagggctgatgagtgtctcatatggaagaagaacttgttgtatatgacaatgacttctgttgccggatctcatggtagaaggagagaaccaactcctgtaagttttcctctgtggactcacagttgcacaccacacccctccccccaactaaggaaaataaatttcaatagctaaatataagttatggatccattttaagttggctgggtgagcagagtcgagcaaagggagatgttcaatcacttagagaagacagagttgtacaaagtattaaataagaaagacctatgttccttttggatgagatgtctaacaggcagagaaacagcaatatctaagccacggaatggaaggaggaggtgacctcaagccttgcgttatcccctcaggctcaaaggtagtcagcatgttgtagtagttacaaaacatgttccagaatgacctgttcaaaacatgggagctctcgcacttgggctagagatctgtgtattgggtgggaatgggataggaagctgactgtgaacagaaggcaggttgtctatctcctcaatgtgtctgtagtgataatagttttgaaccctacatccagctagtcttgtctttccaggcctgttgggttttaaaatgagggcagatgacccagccatggactttccactggccaaccactgttttgtaacatggcgaacatgttaccaatgttctgttctgcacctgggtagagagccctctttatgcactaagggtttgctttcttggtttctcttactcctgaaggaagatgtctctctctggatcacgtccaaacccgagaggagcagaagagcgaaaagatattttataaagtacagtgaacaatgtccccagtttgtgtcagcttaaatagcttcagggatctcctgacagccactggcatccctctttccactgcctctggccaccacagggctccagcctggagcctctatactacttgtcacatttacctgtttgaccaaatcaacttttctctctcaaattctctgtttacttgaactgccctggctcatcttttatttcttcctgatgctttttagaatttgcctcttctacaattttcatgctcatcccacctgtttctaattttcccagcatttttatgatggcctgaagctgctgtttttcacttgcttgcctggtgtaatagttgtgtgtcaggaggttgacctgtctctacacacagtggctttgaggtcatggtcacctctcattctgtgcctgtctgcactcagcatagtgccttcttgccagcataaaagagagagcacatttgtctttattctttcactcttgctttattgatttggttctgagaacaaggcaagagactcattccaccctgcaaagggctcagatccaaagggcacaatgcaggtggctggaaggttcatgctttcagcagattgcactccccttataatttagggctctttacctggctggcatctgctttctgtctccctacttccttccctttgctcccatcagctcaccttgaagagtggcctagcagattatacccagtttctccagcctaaaagctctgggtgccagctcttcacatttgcaatcttcccgtgactggtgtgtgctatcctgtgggtctcaggctgccagctatgctttaataccatggctcctcttccctcactcctggtagctccatctagtcttttcttatgtgagtgtgtgcttttgttttattacactgcttgtcttagacacgtggtcagaatcataactcttaatattctttctacatacttcttgcctgcctttccaaaataactatatttttatgagaaggaagagtctgtgctgtgttcttccctacctgagccctcctatagtttctggtgcagagctggagtcatgtaggccatcctgagcaaggttcgagtttgaaggtgacataggtgtgtactagaagacacgtaaaagatttagagtcatgctttgtagtagtcagatttatttaattttgacttactcaaaatatgttacaatacaggaacaaaacctgaatgaactgaccgtcagcatcagcatggtccatgcgaaagctgtaaaactaatgggaaaagacatttgcatagttcactttcatttatatatagttcaaagccttactattctatttatggtacacacatgcttttaagaacttaaagtaaattcaaagtttagagattaccctcgtgatcatgatggcatataattacatatgatgctagtatgttcattttctttggtgtgtaacagattgtgtattcttttttcttcaacacactatgcattctatgtgttatacacacacacacacacacacacacacacgactttttgtagcaggccatgcagagaagtaagagaaaacactggctgagacagaagcagtccctatggtgtttagaaagccagtgtccttgtatcacagttctatttactcgaccataagagccaccttggatttcggcatgtggacactaatctgagataaggatataggagttagatgcatccaatcaaatgcttggatacaggtcgagagtgtcaaccaatgtattatggttaattagcttactcagtatcaagaggtttccctaaatcccatttagattccttcagagttcatttaaattttgttcttgaaatttctgatttggaggtattattattaactattactaacattacttatcaagacagtattttactatgtagcccagatgtcttggagctcactatgtagcccaggctagccttgcattcctcctgtttccctagttctaggataagagatgtttgacaaagtgaagccatttctaatttctttagtattttgatctccatggtattggctttaaagtttggataatttttctgtctagaattcagtagtatacaatcattttctactttgagacagtcaaaccaagtagacggtgtatgtcctaaatagtattttagcatgaagacaagagagaatagaatgggtaggtgcttcttgccagagatgaccgaggctaagcccactataagggaagattcataggactgcctgtttgtgactggtttacaaagggattggtagttggagaattgtaaaggatgaaggagagaaggtcctagaattgctaaagaccagatttccgaaggtaaggttttgattaggaatacagccaggtagaagtttctgagagatggggactgagcagtgaaaacaggctggtgttcaccacgagactcgaggcaggaaagggaatgtggaatcatctaaagagatgctgtgtggtgagaggtatgagccatcatctctgcagattaaaactccaagcctgaaagcttgcgtgtagaagtgtttcccaggaagaggacatggtgcacacagccaagacctggagaggtgtccaaagccctgaatcaggtactcagcagtgtccttctgtttttatcagttctaccctcccctgacctagaagagggcatgatgatgtctctttttgacccctgtgcttcatatgtgagaatctagaaaagtctgtaacttgcttagaaaacaaattgcctgtttgttccatttactgcatgcatgactaagctgtcatttttctccctctgaagagacaaaaatcataatttcctgtgatttaaatgtagtctgttctttaaaaggtaccgaaatgtgacatgcttcagcaagatgcctgcttggcttaggcactaagtcaaagtgtcagtgtaaatcactggaaattgaagacaggatcgtttgtgggaagtggcaagttactgtctgggtcccagagtggataacaaggaaggcttttctgaacggagtgaagggtggactgatcccggaatgatgtttttgcaatttggtccattgtccctgtgtgttttgcggctggcataattagtgttggaattcagaaatcttaacattctggcagtaattgaatatatttctttgtatctgtggagaaccatgcttctcagtcgactgtccttgattaagcaggtccctttgtcagatgctgtagaaagtggattttgctactgctatcctaggttcagagttgaaaataatttatagtaccaagaaatggagcaaaatgataatgaaaaatatagatgattcccaggtcacttactcttgtgtgggtttttttttttttttttttttggcactatttccagctcatggaatgcttatgcaaattatttttgttagtagcatacatttagagggtgatattgttgacatctaaaagaaaagggactggcctcttcctcagaattcctatgtctcctgctggagtctttttaagaagtcttccctattgagttattgaagaagttgtatttgtctatgttattttaacatatacttcttttctactgtagtcaacttgaaaaaagaaatgttgtttaaacagccagcatagacatatttcataaatgtacttaaaatttaaaattagtaattagtcactagctacaagtactcagatacaaaggaagctgtttctttgctttggttcactgtcaaacgatgccatgggggctggggaagtttatttattagaaaagaaagaagtagttgcttaaatgttctcagtcccacttagatgcttttcagtgctaaaaacctggaaacggaagatgaagcaaacattttacataatggtcatttccatgagcaaactttaaattagcgccagcctgcgatttcccttgcctgtctgttacgaattgggtcatttccacgttcagtaagtgcatagtggtttgatggtctgcttggctttgttttcaccttgctaaggaataacttttttagggggtggaagctttgtgtacagtagctgcctcagtaagaccatagcccactatgtgtcacaattgatactagctgccatctgttttctctagtggaatcctagagtaatttaatttctgtcttttctaaagcaacatctcttcctggaagatagtgcttttaaatatctccccctcccttgctttcctggatctcttatattttgtctatcttatctttcaaagactatttcaaaatttaccttctagggagtcttttcaagctttcctttggccaagcattcctaatccaaacatctgcaatgtgaaaaccacaggatcagaagcttatggtttgctgccatggttgcagaattgcatgcctgacccttggtgcatgaatctcagtagaaatgcagtcgcattaaaaatactgtataaggggttagagagatgactcagcaaaatgtttgctgctcttttggaagaacagggttcagttcccagcacccacatcaggtactcactgatcactcttggaaggctccaaaccttcaaggacatctgcagtcacatggtgtacagatatacacagacacagtaataagcactgttctttcaaattacttaccagcttactttagggcatacataaggtatacatgaaacataaatgacaattgtattagacttgagccccatccacaatagctgcataaaatagctgagtttatgcatatgttacaaaaccaccaagaaggtagaaggtaaagaaagtaaaaatgcaaaatgctccccttacagcatttccaaccatgagttggtagcctgtgtctgctctctcacacggttgtccatccttctcccaggtgtttccctccttcctcttagtaatgtgcttaagaaagagctccgtgcacaccctacatgctctagcaccagccttaccctccatctgtgctttacataagaagagtaaagatgaaatgaaataaatacctgaaggccagtgatctgtgaagcagtaggaatccatcttagtgacaggtggtctgaaatgcaaaggggcttgacttgatttgggccaattctggtagttgagaataattctgatgtcactcatttcaggtggtagagagctattacttttctatgaaatctggttcttttatttatttatttgtttgcttcatttttctaaaaaactatctccggtgatcttttaatgccattatatacatttttgcatactgttagagaattgttagcttgacagtggtatggagattaactgcttgataggccataattatataattacaggttataattaaaactagggttctggtgtctgttgttgtgactatagataataaaacttgctttacttttcaaagagttagagtaaaggatttttgaatgttttccctgcacacatgttaagaaacgtttgaggggatgatgggttacccagatttaaatatcacctagtgtagatatctgttgaaatcacagagttcctcctcaatattcgcaactttggtgtttctatgagaatcacttaagactaactttagagaatttaaaaagcagttagaaagtgagctaacatgaggtgaccagtgttgttacttgggatattttaatgtttggaataaatttgtagactactcatttctgtactgaaaaacacagagcgactataacaaggatgtcaaaaagaaagaaaaattcaaagaccaaaaatttgtaaaagatccaaaagctacagcgtctagatgaacaggcacaaaggtagagagaatatatttgatctgagagaatgaaaatgttatctcactaacagctgaagttaactgggaaggatcagttcatgagttggccagtcaagctaaaagctggagaataggagtgctgggcttcaatgttgttgggtaaggcgatgcctctctctaatcctttctcctcattcaattagtggatctcttagagctgaatacgacgaatgaagttttcaagcagcacaaactgaaccaaaatgatcagctcctgagtgtcccagacgtcatcaactgtctgaccaccacttacgatgggcttgagcagctgcacaaggacttggtcaatgttccactctgcgtcgatatgtgtctcaactggctgctcaacgtatacgacacgtaagtgtgtcatttatcctttaaatgatcactagtgagcgaagcacattgataataaactgggcactatcatcatcgccttgttgttgttgttgttgttgttgttgttgttgttgttgttgttgttgttgttgttcttcttcttcttcttcttcttcttcttcttcttcttcttcttcttcttcttcttcttcttcttcttcttcttcttcttcttcttcttcttcttcttcttcttcttctcctcctcctctccttctcctcctcctcctcctcctcctcctcctcctcctcctcctccttccccttccccttcccctttcccttccccttcttccccttccccttcttccccttcttccccttcttccccttcttccccttcttccccttcttccccttcttccccttcttccccttcttccccttcttccccttcttccccttcttccccttcttccccttcttccccttcttccccttcttccccttcttccccttccccttcttccccttccctttccccttctccttcttcttctttcttcctcctcgtcctcttcctcctccttctccttcttctctgtcaccctcattaatgggtgatactaaagttttaacttgggaataagtttgcacatggcaaacactttaccattgagctacatctccgaccctagtgtgatttctttaaaaagatgttttcataatcctctcgcccagtagaaagatttattctgattgtttaaaagtaactggttttccaagtccttttgctcctaaccataggataagagggaacatacaagtgttctttcgtgacttcctagtcagtgaaggctggggatgtagcatgcattctctttcaggaaacagctagggaaacctgagctgcatggtttcttttctttctctctgctccttactatcttagattattatttttcaacaggcaaacaaaagctgacattcactgtgaattaaaatgatttttagcatataagaatctctataactttgtaaggtggcggtttgagtgtaatttggacagcagtgaataaaacttggtttgtccttaaataattgccattgtggttatgtttttctaaagtggtcttgcctttataattgatgctatatgacactaacacatgtacttgaactgtttctcagtgtatagaaggagcacccttaacttccagcccagcacatcccgcatatgtgtgacccttttgattttgacaatgtatttgtgcactaatcagttatcaaaagacttgctgtgagctgacatttcagaaatgttgggaattattcattctctggtagggggttgaagtatgcaaaaatgaaagaggaaaatgaagacttgcttttctcttgaatctcaaaacttagttctcattaagtagctacatgaagatttacatttgtcagcctttgatctgaagacagagaaggtaagtggtcgtcatagacagagaatatagatgatagttcataaatgtacatgttctgaagccgattcattctgtgtaaatgatgatgataatagacatgacttatctataattttatctactcctttcattaggaaaagagatcctttatctttcagtagtaacaaatatcaatatatcttttaaaaaaataaaataaaaggatagccttgtgagtgagagtgaagctcagttaccagaaagagaagaggatttactgtaatacactgctgcctggtatcttttattatgctttttaatacaaagttgtaattcttcttggatacaatattaattttagtgtaagtagctcattaatttgctcatcactatttcaaagtctcaaaggacatcttttctacaataaattcaccgcaaatagctcgttatttccgtgttttctgtgcagtagcctgtaacatggcttcccatctcagaaagaaagctaaatgagaacgtctggggacttcatctgactctgaaatagcaagaggaggacaacttgatcaaagtttctggggaacaatctgccccccagcaggttcctactatgacaattgtagatttctaggttgctgaaaccaaacctagtatactaggttgcttaaacatcatttcctcacatctgtaaaggcctgaagactgagctcacggtgatggtggggctgactgctgtgttgttttctccagaacgtctccttggctcttcagtttctctcttctttccataaagagccataaattctttctacttgctcttttttcctacaagtgcaccaggcattctggattaaggtctccccttccatcttcatgttaactgactcttgaaagatgctgttggcatgaaaagcagtatcctaagatacaaagagttaggacttcagtgtgcaaatcgagaggaacacagttaagctcagaacatatagagaggatgctgttattctagaatgaggaggcagtgactctttgttaggacccacccagtgtgcaaaatgttgtgattcatttctgggagttaaatgttggcacaatcccatttctgactgccagatgtgaacacatagaaatgctacatagaatttttttttctactagaaaaacaatacctcgaaatatgccattgttttgtttttaatggataaaaaaaatcctgcaaaacttacttcccctcaataccaatgaaacatcaatcacccctctgggtcagatgggttcccttcggtctcactttctattgggataaatgaattaagctaagcatttgaaatttgaaatgtatataaagaaaatatctaataaaaaacaaataacaaattaattaagctaaggaaaattcagttactttgtaggcagtaatcactgatgtccagcaatgactacctgagtttctctacttcatatggcccattcgtttatctgagcaatgactgttaactctacttcaagtaatggtcctctgagtgactctgatcaactaactataattttactctacccagagtagggatcttggatattacagaaccatcagaaggctttgaacttaaaaatgatgcctgtgttcagctaattttttaaaaaagttttatgtgacagagttatagttctttaagaaaatattttaatgtagatttacttgaagcacaggtgttgggggagcgaaagagtttcttaggaaatggacagtgaattcccaagagaaaagcagaccacttgaaagagttacattgatttacctatccatccatcatccatccatccatccacccatcaattcattcattcattcattcattcattcattcattgtttgggtttctattgttgtaaaaaaacaccacaaccaaggcaagtcttataaaggcaaacatttaattggagttagcttactgtttctgaggttcagtccattattatcatggcagagtccagatagatgtggtggacgaacagagttctacatcttgatctgatggcaattaggagactgtgtctttccctgggcagagcttgagcatatatattacctaaaggccccgcctccacagtgacatacctcctccaataaggctacatctcctaatagtgccacttcccatgggccaagcctattcaaaccaccacacaacactatcataagcaggtgatgaaatcaactcacacagaggaagatagtttttggatagtcatttgagaggtttcaacccatgactggcttgcccctgactgtaggtgaggtagcacagcatggtgggaatgctggtggaccaaactgtcatcacatgacccagaaatgcaagaaagggaagacaatcctgttttcttctgggagggtttgcctctcagaggtcatctaataggttctggcttttaaagtttctcctggtcctcagggaccttttcagatgtaaactgtaaactgttaggtattttcaactccttgatttattgccatatgatgtaaccagggcagaccttctcaacgtcaacttgaaataatgagtcatgcagatagaggagatcaaagaattctaatacacatatgacttagagatgagatatgatctttccattttgccctctatttaactgattggaaaacaaacacatggagataccagagtttttctgtaaccacctgttacaaatcaatcatagttacagggctaacttgtagattttatttccttggttgcatggatagtcttatcatattgctgtagcttagccatgacgctttataaaatcaactaaacttttgagttttaacatatacccagcttcacgtcatattttcagttttgtgccctggttgctatgttacttggcaaccacttaacttttggcatctcagtatctggaaaatttagttaaaaataaacacacagcttaccatacaaaaggtgaatactaggggcaaatgagctaatatatatagaaaggggctttataaactatagcaatcaaatcgattccatttatgaattcacagcctcactctgtctttatcttgccaggttcaaaagtcttaatttcacaatcttccttctagatttaatggaaatccaaatcatttaaatcatacttcagagcaatagtctggaacacttggttcaaacattttttttctctatagagaatattagcttcatttgttataataagtcatatttctcccactatcctgagatgaatataattttgaaggcacttaacttcacagttaaactaatttcagaagtcacttacaaaaactgtcctgggaattggatacttagctattgggctagatcgctcactcatacattttattagctctcagatgcatctccaattagatatcctacttgacatcaaaatagtcaagaatggccccatgtatgcacagattaatcagccagtgagcctgtgtataaatgctcaccccaccctatgtgttggagggggtgtgtttgcacccacacctatgttctcttacgcaggcgtgtgctatgacatctcatgtatgtctgattgtaatcttctctttcttagagggaggaggacagtactagggattaactagggctggcccactccatgtaaggcaagcactctgccactgagctccaatggcaggccttaagtttgaacttcttgattaactgtgagaggctgggaactactcaaagtgctctctcaaaaacctaccaaccacagtcatcttgtatttggtttttcatttccacacattagggttgatactgtattttctatagtcaccctcttgtcttacttccctagctagtatgtgggttattgagtaagaatcaggttctctacttcttcttgaagttcatggaacaattctgggatcttagattacagtaagcctttacagctgatggtagctgattgacattttcaattgtctttctgatgatgtagctctcctgttttcccagtagacttggaagtcagctctactggtatctttctgatcccttaaaggactggtttgtttttaccaacattcttgcaccaatcccttagctacattcattcattaacctttattactttctaaaagtaaattgcctgtgttcagaggataaacactttccagctcttgaagggaataaacactatttcatatgataatttggaaaactctacaaatattaagtagaaacatgatttgaagtatggctcagtttatttgaaactggctggtatttcttgactctaggctaggttaggctagaacttgtcatttttctgcctgttgaattctcagaggttgctaccatccttagccataatctaagcatgctttctttttcttttaaagaacatttatatgtttggtgtcatgctatatatgcagacatttacttgatcatttatcacttgaaaatggaagactattacttagtatgactaacaaagcacattacagatgtttatgtatttttcaaatactgtaaatcacaacctgtattagttacttttctattgctgggataaaacactgtgtccaaggcagcttatagaaagacaggttttttatggcttatagttccaggggcatgggagaccatcagcatcatggtaaagtgccaaccatggatgcaatatggggcctggaggagcaagcagagtaagagaactcaaagtccgccttcagtaacatcccttctccagtgaggacacacctcctaaacctacccaagacagggccacaaccagggacatagctcaaaaactaacattgcttattcatacaactacactgtcttatgtgcccatatagtaagtgaacattcgcttatgtgttttaaacgttcaatatgtatgccttaaatctaagaaattttagagaataaacccaagctgaaaacggatgaagattatgaaacaagaaatatagtgagaagactttttcctgggttgtgtgttgttccactggaaagatcatgttctgttaattttatggtgcttttctgcatcccagggcttgtttaacagcttaatactttgataggcattggaataaaaatgtgtgtgtgtgtgtgtgtgtgtgtgtgtaaaatctccagttcttaagtgaaattgaaatgatgtttcactgtcttagtgtgaaagtatttcctagagctgactaattaatacattccatttttaattacaatttcatgcttcctctaatacagatatcaccccagcctatttgaaaccattcactattaaaattgcaataataatttatagactacattggcagagatcaaagtgaatgaagacagcaaactctaaagtttcataagccctgagtcttcaacatataattttctacgtatattttttttacatttgggttttaatttattagtattcttctcttgctatataatgttgcgttcatatgttgtacagcctgcttgctatctagctttgatgcgtattttgattttacatttaaaaccaacagatttcagttatagcatttctttaagtaaaatctatttggctttatgattgttgtttttatattcatttcatgtgttcttgggctgtgtcttgtgtgtaaaaggacgtcagtgtatttttctggacttgttcaaagatgttgaactgtcatgaagttgtgatgtaggtttggcagtaatggttaaaaccaagtagacaagttgaatctttaactcgaatttattatgcagtagtttactcccaagaaaatggcattcaacttgctgtgtaaatgcatataacccatcttataatttcaggggccggactggaaaaattcgggtacagagtctgaagattggattgatgtctctctccaaaggcctcttagaagagaaatacagatgtatgtaagaccttttactccatggtgcttctaataataatctaaatttattgggcgctgactttatatagtttgcggtaatgttagcttccaattggaggtgcttactatgtgtaccagtttgaacaaagatgacaatgtgaagagaatttggatgatttgaaaaactgattgtggggcaagagtgaggtgtacagatacagcacaaactaagcacaaatgtacattcatttaatattagaatattctagtaggtattacaactcccattcttttaggtgagcaaattaatgctgaaataggtcaagaatctagtcaaaggccgtatgacccattaaaatgttggtgttgagctaaggactccataacccccttttttttctctcttaaaaatctcatttcttccgtttattgtagcaagtagtttttgctaccccactttaagctccaggtggaccacactaccagccccacccagactcccttgcatccatggattaaaaacaacacacatactctccagtgagtcttagagtgcttttgctaactcagtgaccgcaactgaaaactcacatcactggttggcttaatctcctgctgctactgcctccttcttcttccccagattctccctgaatcctcctgggtaactcttaagtatcccaccccatcctcagtcattgattggtccctggtatctttattgagcaatcaagaaccacctgggaacaggaccttagcattagactccctacagtttatggttaatgataattagaaaaaaaaaagaaaagaaagaagaaagaaagaaagagagagagagagagagagagagagagagaaagaaaggaaggaaggaagaaagagagagagagagagagaaaagtaagagggactaaaacttttattagcctttattctaaatagtattattttgtaatttggacattataaagtgatagatgctttcaacttttatttcggttattcaagtaagtgcctcattagctattgattactgaacaatgtcttggcatgctcaagagtgggacctgtagttatatctttcccacttagtgatcaagtgtcattagatgggtgtcttgatcccttttagtacgtctagccaaaagtaatattaccactatttcctggtacactgagctgtacaccagagggtgagagatgagaccaacaattgtaccattgggaggaaatcaaggtaatagattacaaattgtcaaaaatagcagtggtcaagtaaatgattaccatctccatgtgtctccaaactcattgccatggtgacagcatgtcgtttagttttatttgttcataaaatataagtagcttgatgctgccaagcctacttctagatgagtctgtgcaaataaatctgtgtatttggaggagagtgtggataataatttttgaatagaaagatatcagaagacaaaaatgggtacaagaaaggagtagtagtatgagggtctattaatagctcagtggtccatctcatgctacgcaatgtccttgctcctatccccaaaatcaagaaaaaaattttccccaagtaaaggtatgtgatcattgttcttataacctaagtcaattgagtttcttctaaaagcattcaacatcgtgtattttggggataactgttattgtttgatttaaatgtcaagcctagaatccaaaggcatgattttcttacaaatgttaacaagaatgttcaagaaagagctgtgggttttgtacagagcatgagcttactgaagaaccaggagttgaggatgctgaagtgtgtctgagccttgcaagccatgtagagagacgggaagaagccctgaataaataaaccttacataaagttttgtctatggtcctttgtctagaacttcaggaatcttcaccattatcaggaaaagatatttccaaagcggagaacttgccatttctaaactgattaggaaaggaaagaattactgaaaaatcagtgttccaaaattaggaaaagattttcttactaatcatctgtgattcggggtttttcatacgctcccaaaagacttggggctttaaaagtaacagttacatcatagtgctgaatggactctaaaatgaatgcaaattcaagctcaagatttgcattttctgcaaaacagcattaagtgctcacatttgggcaagaaagcagaggcccttgcattgcaagtttctactagtctatataactcatgatggatgtcacttcaggacataattaaataagaaatctcttgggctaaatctttaatctaaatctttacttaaatattgaggccctggaaatgtcctgaggttcagttttgtttcttatcttgagatcttgagcaactccgattccacctttgatttccccagtgttgtgggaacatctcttcattattattttctttgttaaaattaatattcaaaacaaactgctcgttagcctcagtaacaggaggcatccatctgaaaagcattttgcagtggctgatattagagtctttgtcctacttgtgcctattacttgtgacttactgagaatgactttggagtggtttctgacattccatgggccgtcctgcaaatggccaggggcttgctggcatcagcagaagcacactcaggaagcatcttttggagagccccttggatctcctctggtttgttttttttttttttttttttttttttcaagcttgtctcttagttgtttctttccattttttttgttaattatttatatttcaaatgctagattgctcttcccaattccccctcctcgagctgtccatctcatccttcctccccccatgcttctatgagagtgctcccccacccatccactcctgcctcaccaccctagcattcccctacactggggcatctagcctccacaggaccaagggcctctcctcccattgatactagaaaaggaactcctctgttacatgtgtgactggagccatgggtccctccatgtgtactctttggttggtggtttagtccctgggagctctgggggaaggaggtctggttggttgatattgttgttcttcctatggggttgcaatccctttccgttctttcagaccttcccctaactcctccattggggtccctgtgctcagtctgatggttggctgtgagccaacctcctctgtattggtcaggttctggcagatcctctcaattaaaaacttgttgtgacccattcttcacatcctctgcataccacctcttgtatacgcttctaagaataagaacgcagtgcttggtgtcactttttctccatgcacaatacactttttctttatgagtagtctcaccttcgcagtggcatagaagcttagctttcagcctagatgtgggaacgttgggcagaactgatgctcttaaaaatgtgcacctctctataaggatcatttcacatgcacatagatgcacaataagcatcatggtaagaattcggggccaatgttttgggggagatgatagcctttttcaaataatataacaagtggagctctataaacaaatctaaatgaacaaatgataacaataattaattttatctcagatgaatttccttccccttcttgtgcttatataattaaaactgtatttcatgataattactgtgtcgatatcactcaggatgcttcagtttggaacttcactgttgacactgttagataaggggagaatgacgttttatctgctgtttatgttttggatattatttgaaaatggtttgggggaacatcttaaatatttaatatttaatgcttcttcttagcattacatgacgaacatttaaatagtatgttttttggactgttacaattcaacaatgcctcccaaatgtgtcagtttttatgataaaaggaatattttttaatgaggtgtgtctccatgcagaaaaagtaatgtcctttcctacattagcttcttcattgggaatcttatattaattattttttttcaactttttgttagatattttctttatttacatttcaaatgctatcccaaaagtcccctattaccccactaccaccctgctctcctacccacccactcccacttcttggccctggcattcccctattctggggcatataaagtttgtaagaccaaggggcctctcttcccaatgatggccgactaggccatcttcttatacatatgcagctagagacatgagctctgggggtactggttagttcaaattgttgttccacctaaatgcagacccctttagctccttgggtactttctctagctcctccattagggaccctgtgatccatccaatagatgactgtgagcatctacttctgtattttccaggcactggcatagcctcacatgagacagctatatcagggtcctttcagcaaaatcttgctggcatgtgcaatagtgtctgtgtttggagactgattatgggatggatccccaggtgggttagtctctggatggtccatcctttcgtcttagctccaaactttgtctctgtaactccttccatgggtattttgttccctattctaaggaggcatgaagtatccaggtacatttacacaatggagtactactcagctattaaaaataatgaatttatgaaattcttgggcaaatggatgtatctggaggatatcatccttagtgaggtaacccaatcacaaaagaagtcacttgatatgcactcactgataagtggatattagcccagaaacttagaatacccaagatacaatttgcaaaccacaagaaaatcaagaagaatgaagaccaacgtgagaatcttctattaattataatcctcaaaatgttacccatagtagatcaaagataaatatcctgggaagaggagttttaatgttgttgacttaagaatattagaaaacaaagcactgtttgccttgtttatgcatggaaaagccaaagaaaggcaaagatacaaacatttttatgtcttaaaattgaaagaaaaaaatgtttcattacagaaaataacttattaagttcctaaaatgaaaagctaaacctccttatttatttttggtatttataatacaaaggaggtatgaatataaacatacctaaaataagatgaaatgttcgtgcataggatattgaatttgtgagtgaacaaagaagttaataaatcaattgtaaaatgtgaagctatcctttatatactatatgctctagcaaattataagggaacctttgttttgcctcatgctttttctagggaatgccttagactataaaattaaccaatgtacatttctttatagtatttaaaacagtaattttctattagctgaccagatttaatgtaataatctataacataagattattcttttatttttaaagattcctttatgttaataagattattcttttattatttatttttatttatatgagtacactgaagctatcttcagacacacaccagaagagtgcactggatcctgctactgatagttgtgagccaccatgtgggttctgggaattgaactcaggacctctggaagagcagtcagtgctcttaaccattgagccatctcttcagccccatataagatcattctaggacatgtggttctgtttacagatggcagattaagacacctgatctggataatatccctccttggttttgttttttttgtttgtttgtttttttttgttttgttttgttttgttttgttagtttttgtggggtttttttttttttttttttggttttgtttggtttttggttttaagttgacatagtttaatctacctcaccgaagataacgctttaagtaagataatgttttgagtaggtagatggtaacatctcgttcttcttctttgtaggtctctttaaggaggtggcagggccaacagagatgtgtgaccagcggcagcttggcctgctacttcacgatgccatccagatccctaggcagctgggggaagtagcagcctttgggggcagtaacattgagcccagtgtccgcagctgcttccagcaggtaggcatgggcattatgggtatgtatggtgtgttgagaaagggacttaatgtttccaagaagggagtcagttgtgctagcatcaaacagtggaggtttcaggtatcagccctctaagctgatgatttctttcttaagttacatttgactcaaggcatagtaaaaccttggtagatatacatctttttcagggactatacattgaagtgcagtgttggaattgcaacatgctggctctgtactcatgtctgtgacctgtccccttgtgctcagcttctcgtaatactcacttcactccttgattcctgcttccatgccctcggacatgcactcttctgtttagaatgttcttcctttgtgtgcacacactctcttctcccactcgttctgttctgtctttatgtgctggcttagctcttgtgtctgctcaagccctatcaggtgaagatcctctgccctgtcatgctcactacagtgtgacatcatactgagatatgtaattaattggtttgtattgcttcttccttgtccacctaagcttcctggagacaaagctatgccttcacacgtctctccagtcttagtctgctcaagctgctatagcagaatctatgaactggtgggttatgaacaactgatgtttattccttagttggagaggctgagagcctgaagattaaggttccagcaggtttgacatgtgctgaagaaagctttctgacagcgttttcttggcctgcccaatgcacttcagaagaacaatctgatggttgctcatcccttcataatacgttgaacctcatattgactttgatacgttttcttattgaaggaataaaaatgctttagtgttctctgtggagaatatcctttaaaatatgaaagcattacaaaaacagccatcttttctcaaatgcacatacacacaaagtcatgtacaaatttttgcactgatctgagctgctaattttcacctgggcaaaagccacagtttcttttttaaatgcttacggtgcagaagaacatttataaatgctactgatgtcatccatatgcataaagttagaagcctacagatatttttccaaagcagagccaatgatttatcactgttgagcgaaagaaatgctcacacggtatctttgaggagaatcaatgtcacgggttattacattttataatggccctttttcttattttagaaataaaaaaatgctaaatgattttttttctaaatatgatttatagtcatatgtgtcagtgctcagaatgacctcaacccctgcgggaagaggcagttggcggaatttacctctgctctcacccacaatcattcagcattaggattcaaggaagacttgagttgcctcacaaagtctgtcttgatgagcttagagaacctatctggtggatccgggctggtctgcctccagtgtgatgctctgatagaacagaggcggggcgtagcaatgactccttttgggaaacatttgtaaagctcgtgtagagtcttccactttgtctggaaggtgaggagtcctcgtctcgtacgtttaccatcttagataaacttgtgctacagaattaaaggctgggttacctggaatcgtgtgggttttcattttgcttcctttttctttctttttgatttgagcacagagggactaggtagacggcccagttaaagggagtttccgtagaagcctgaggacttgggatttatctccatgacccgcttaagtcacgtgtagtagcgcatggcctgtccttgtaatcccagcatcaatgtagcagagacaggcagatccttgggctcaatcaatgaaaggctgtccacgggcctcctcatgtatgtgacctgcatgcaagtgtacctgcatagatgaacatttaaaaacccacaaataaaaaagaaaatctgagcactaaggaattgccccccccaaccatatggcaatggctgcttccctaccccttcctgcattcttctaattttagcttctagaattttcttaccttaaagaacctattgtcttggctggcctggagtcacttgacttttctctcgtgccaatttgcagcagcagcacttgctgcagcttcaatgaagagctgttcttcactttctgtctcttcccccagaataacaacaagccagaaatcagtgtgaaggagtttatagactggatgcatttggaaccccagtccatggtgtggttgccggttctgcatcgggtcgcagctgctgagactgcaaaacatcaggccaaatgcaacatctgcaaagaatgcccgattgttgggttcaggtgagaagcactaagagaaatcagaactcaatggtctctgctctcctcatatggccatcccttcccatttattcctgcttggtggtttgtctttggagtacatttatgctccacagcgtccttctttccaatgtaccattcctcctcatgatctatacacaaacttattttgattcttgtagttatttgtaatactttagtccagaatcagaaagttttataaatatcctttcactgaggccataggaatacctgcgcaggataattgcattgtagattaggtacatatagtcttgatcaaatttgttggctgttctaagttgtttgggatcaaagttagtaagacaaaagcaatatgtaaaatatgagcaagaagttatcagaaaactgtttcgtgtgctaagtttgttgtgatcaattctacatttcacctgctcattaattctgttgattgtctattctctctctctctccatctcctacctttttcttaatgagcatgtatgtatatactcctggatatgtgtacatgtgcatggagaccagagattgaggtcaagtatctttatctttctcaatgactctccagcttattcttcatccagagctctctctgaatcttgagtttgacgtcagctaggctgagtggcatgccctgggcatcgtcctgtctctgcttccccagtattcagatcatctcgggttgctggtgcatgccactagactcagcatctttatgccaactctgaagaatctgaactcagatcttcatagttggctaagccagtcctgccacactcagtccatctttttttctcatcgtgtcaaggacactgacttaaagccttagaggagactgtgtaggactcttaccttggtcttcacaggatggtgtgtttgttcacgttggttccttcattacctcttgaaaaagtatgccacattcttttcctggggtttatgatttctcagaaatagttattacatagctattagtatatgctttaaacattattgctgatcacattattagttatggtcagccaaaaatgataatacactgaccttatgagtaatattgaacttttctgtaaaagtggagacatgaggaatgtacgtgtgtaagatttatttttatttatgcgtctgtatgtgtatgcgcatgtatgtgcctgtgtgtgcacccatagaagagggtgttggttccctcggagctagagtttcagatggttgctagcctctgtatgggttctgggaatcaaatctgcatcacctggaagtacagtgaatgttcttaattgctgagccacctctccagtccttcaaattgagctttagtgaaatcttagatctctaaggtgtttaccgagctgagaattgtttcatttcaaattccacacagctggtcacagtagcatgaataacaggcaggcctcatctcctttcatgtgaacaaaatgctaagagatatgccaaggctggggctgcatgctcatcttgactctcggttttgcctgccttcataatctctgttatccccaacccatgacttgaattttcacgctgatctccactggcaaattggctcctctggatgtcatttctgccttttgaagagagggaaaagccatgcccttcttcccattcaattggtcccttaaaatcccaagggaaagccttgcccaagacttcaccctgtattgtcctgcttaccaccatcagcaagcaagactgagaaacagcagttttagcaaagcacatggctaaaacatagtgacagtgcaagagtttctccctggtgaagaaaagggaagggttgcactaaagaagatttcacaaaggacagacaatgccagccatatttgtcaacctatgagaaaaggttaaaagatataagtgatctatcaagccaggagcataacaaagctggtataaatagattgtcttcagataacttgcatttttgcatgtcattttaaaagtccttcatcacttgatagtgtatattaacctcacataacctttacagtgtctttctagtttgactttgctagtcttggcatttaaaatgtccctctacagatacagctgtaatgtatgtttctatctatacagctgtaatgtatgtttctatctatacagctgtaatgtatgtttctatctatacagctgtaatgtatgtttcttagttcccccagttgtcttaactgagtgggctatttggggagcattttcctttcagactccatagaagtttaagacttaagagtgttgtttctgcaaatagacatcagtgcacagggttactttctacgagaggcttaaaacattatttctttcaagactgtgtaatgatcaaggtttctctctctctcttcctaataacgattttaaacaaaacctaaaaatgctcaaggtagaaacgagtgttcttatgaaggaatcttatattcatttcttatgagtggtcttgttgatattttaaaataatgtgtgatgctcactgtcataacttttctctatcatttcctctccacactcagatctcatgcagactcttctgacattgattctagacttcacatcatgggtaaacatgtgcaagcatgttttcagactcttagatgcatttacacatgtttatcatctttcatggtatgcctgcatctaattctcagtaataaagaaaaaaattaattaaaaagtttacaaaacctaacttaggaacaaggcttctaccttccttcataatctgagatcctttttaacaaatacttaaattcctctccccttgttagagagataaacttcttttttttcccccctagagcaagaacaagcagaagtcttattaagacagacaagacacaaaatgtacataaatctaaaatctaatgtaatgtgactaaattataaacgcatataccttcctctaactccaactttatagaagcaaaagtcttacacttaataaaaatatacagaatgtataaaagcttactccagattggtttctttctgaatagggtcttttcatatggaaacctcacattatgtcatttatccttggtagtctacatgtgattacagccatcgcttttaaattgacactgagaaacatcatcttgcatttgtagcagatgcgctcttggtttcctaagtgcaaagcttgttgctaaggcacagggttgggttcagtggcaggagtgatgcctgttcttttctccaccacagatacaggagcctaaagcattttaattatgatgtctgccagagttgcttcttttctggaagaacagcaaagggccacaagttacattacccgatggtagaatactgcataccggtgagtatcttttgaatctactgagcagttatatcactggtttcttaatcttatttttatttccttatttgtttggctgattggttggctggttgtttgttttggattttttgagaagggtttctctgtgtattctttgctgtcccagaactctttttatagaccaggctggccatgaactcacagatctacctgcctctggctgccaagtgctgggattaaaggcatgtgccactacctcctggctagtaatgacacttttatctaatacatttttacttaactattttttaaaccttcaaaaatttatggttgtaaattttgttgttttctttccttttaaatataagtgtttcttatgttgaattaagaaaaattctacattataccaaatgtaatttgttaacttaccaaatatgtgttttcattttaaacttaacttttttggaagcatattaagaactcatactgatttagctatgatgaaaatgaaaccacttgctgaaaacaaccatgtttctcttaaatttttaaaggatgttttttgaaaaaaagagttataggtgatcaaaaatgaaaaatagagaaattaaaaattcatccatacatttagtttctgaacaaactaccttctaatatttaagcatgttctaattttataaaacatatgtatagttttacttgattttttttttaaagacattgtatgtcactcatgtagcatgggatggcctggtgctcactatgtgtattaggctggtcttggacttactgaggtccatctatgtctgctttctgagtgccaggattgaagacatgcactaccatgcttgctaataaaagaattttcttcaatctggagtttgtctgcccccccacccccacccccatttttccttagacaatagcttcctggaacaaagtattaagtgaatgaattgctatagctggcctaaccatcttttagatttaagtctttagtttcctataaacagcatttaagagcattactgagaaggtaacattttatatgtgttatataaattacatttcctttgggcaaatgaccagaagtaggtgagctaggtcaatgactatgagtagctctgtggccaaaatacttaatgtcaagttgttttccaaaagaggtccctgccaccatatcatacagtcacatttgctaatgtgttcattttgccatagccccctcacactggacacagttatggttcctttcatctaaagttgctttgtcctaagattatcctcattttctgtcaatagccattccttagttttgttccagattgtggcaaaatttatttatagagttgtatattttctttggtttagagaattaagtaactttttagcccataaatctatacaaaggcagcagtacttgtaaaatatgcacatataattctcctattcttgctgtcttattttaagtcaatagagattctttcatgtggagaggaaatttctagaaaatgttgctgaattataatggatgaaataatcttgatgcccaacattaactaggaaaatattgctcccaatgaagctggggaaatatctattacagttattaatttatttactaacccagttaatattgaattcttactgtatgtcttacatgattatcaaagctagctgctagttgaagtggtaggacagtttattcagtagaatccacatgtatgtgtgaggagtatgtctgtacacatagtggagtgctcagaagtatttgagcatgtgagaaggggatactggcttggcagtgagaaggacagggacagagctaagcagaagacaaaagaaaagtgacaaaagtgtgatgctggagaccagctgtgtctccagttagagaagttaggataaatctccataaaaactggaaggcattgccttcttacctaataatctcctttcagagaaatggctttcgaggtcctcaaggacaaggctcctgagttctaagcgatcatctgcccatttcaggaccacaccaaggtttccgactcctcattcctttttgataagtcctcttggagtggtcagggctcatttcagtgtgacattacacagacaggaaatgttttgagcagcatagtttctacaaggtatctacttgttctatgctgttatgtgcagctggaggtcataagaagtatgcagccttgagctatcagaaatcaaggtgatgcctgttcaagtcttttaaaagaggatgggatggggtggatggaacaataactgagaatgtgttatttttgtaggtcagaaattcgacagaatagaaggctatgaaccttagttagatccaagagagaatctgtctttagagtcaactctaatggtttgtcggttgtctaggaaagacaagattactgatgtccccactgctgtctatataggaagaggaaatatgtgatactgagcaaggcaacagagaaatgagatgactacgggtctagtggctgtatttgaaaagcaggatgaggagatgggagaaaccatcttagataagagcaatcaggtccagtttgagaagctaacatttggattgaatatgaaggtggagagattcagcaaccatgtacagaatggggtagagtaacaaggcattgagacggaagaagcagcagtctcagaaagaactctgatagcaggcaagaggctgacaagaagatatagaacagaagtggaacctgtccttcaaacaagacacagggcaggctgaagtgcctagagaaaaatgaaaaggtagggtcccctgttcaaaagatactatgaatttccaagtgacaataaaggatcattaaactgagctggggatgttctgagcatggtagctctgcgactagctaggccttctgtctaatgacaaagacagtgggagaacaaagggcctgatgaaatagtgtcaggttgtacaatgctcttcagatccttataatagatttggattgggaagcagtataatgttaatatttacatgataatagctagacatttagggagctgattataaagatctggtattaaatgggaaaatcaagataagtggataagggtagaggaatgacgtagaattactgtttttattctcactaaatacaataattttaaataaattcttaacatttctaagcaagttgaaagcaaggcatgtttaatgatcattgatcaacggaagcctgtttgcaaccagtaacacatgtatgaagtttcctttcctactactaatgttgaatttaaaaagaaaacaaagctccaagtcagcagttttcaacctgtagatcacgacccctcaggtcgaatgatcctttaataggaatgccaagaccatcagaaaacacagatatttgtattaccattaatagctaacaaaattatagttatgaagtagcaatgaaaataatgttaaccacaacaagagaaaccttattaaagggttgtaccattagaaaggttgagaaccaccgctttaagccttcccaaaatctttcttctgtgtggttatttccaagtggctttcatttctgaggttccatcttgctttttaatttcctggatggtatcatcctttcggtgcgggaggggatcatttcacctttcctgatcttatgtggcaatcctatctgggttagtttctacatttaacctacaacttctagtccatttttatctgatttgtgttgggaatcagccccagacgtacatgcatgctaggcaaacaactcaccacagagcatgctagacaatcaatctactacagagcttaacttataacctttcctaacttctggagatatgtctgtaaactgagtcttagaggcatagtcttgctttaaatggtatgatgtgacttaattacgttccagtgtttttcacctaaatcctttagaccttttccattctactctcttcgttataaacaagctgtatgtatggcccattcatctttaccttgacatctaccttaaaaaatgggcttaaacagtgctcaggtttgtttttctttttttcagtgaagtgatatttgtgcattaaatggttgtggcctttccataagcaccatgttatttgcagttctcccaacctgtcttcatttcaggttaagaaaatggcccattcatatcactggcttctctctttctcctccaaggtcacatcttacccttctttcaatgtgtttattgttaaaaagtatactttgtcagccttataatgaggctccagactccccaaatattccaccaacctatcagcttattgcctatgactgtgtttgtgtttagatgtagggaaactaatgaggtctaaattagctctcatgattcatgaaggtattttattatactactaataaaatattcacatgaggaaatggagtggaatttttgtttttacgaaactgcctttaactcttactacccattactattctataatccaaatgtgtacctttataattccttcagttcaacaaaagtttatgttcaagtgatagcgtgacttggattctagttagtgtgtgtcccctttctctctctattcatttgcatcttacctttcccccaaaataactcgactgattcttgtagaggaatctttagaggttcctctaggctttagacctctagtaaggacagtgcatcattatagaagcatgcagtaaacaaactacttacatcattagccagagagcagagaagagaagcagagacagtatcccacaatccccttaaagatcaccataccagtgacttgaccatccaataggcttcaccttccaaaagcttctgccaagttccataaggacacactggagattgcctttgatatatggaccttcaaggaacgctcagtatccaaagttagccctataagctgctgtaataatacagataggtgatgtgtaatgaacagactcttacttggctgtttctaaaagtgaggaagtctaagttggaagggacctcatggggccagaaatctcttgcatcattacatggtagaaaatagaagggcaagacagctcctgtgtgaaagagaggggaaggatctgaacacattctctatcgggaatcttcactgctaaaaagtagctcttgtgatcaaatccatccttaatggtatctatgatgtaattcactcttaaggattctacttttaaacactgttgccttcagataaaattcccagcacatctaaaaaataaaatcatttgtctctgtaatgaaaattcagtctcctttaaataattgctgctgtaaataaccaaaatttaatttgaattagaaaaatcattcatgtaattagagaatttgaaagttctttttttaaaaaaagttattttactatttcatccatacaacatttttgttagactgggttttgattttggtattggcattactggggaccaatctcacggtctcacacgtgctaggaaaccacttttcttctgagctccatcccagatcttttaaaaggcatttttattttgagatagggtttcaaaattgcatagcttgaccttgaacttgctgtctgccaacctcagccttctgagaatctagaactacagggctgccctaccagacccaacatacactcttaactatagctacagtgctatctatggagactcaggaactcactcttgttacaactgacagtttggatggctttctatttttgaacctctctccagatttgagaatcaccattctaccctctccactctcagcttaactcctcacttatttacattctttgtataaatgagaccatgcaatatttttctttgtatatctgaatcatttcactcaggtccatctgtgttgtcaaaaatgggaagaattccttcttttataaggctgaatataaattataagcccttccccatgttctctctctctctctctctctctctctctctctctctctctctctctctgtgtgtgtgtgtgtgtgtgtgtgtgtgtgtgtgtgtgttgattttcctaatccatgtattgtggaatatttaactagtacctctttgagaccatgttgtcattgtccttgggtgtgtgtctagaagtagaatttctagatcaccttgtattgatcctttaacttctttaaaggacttcagaccattttccatggtggctgaatcagtaatagtatatctttagatttcaggctggtggtatacacatagtttataagagtgtgtgcaatttctaactatgagcgagcgctaaatagggttacagtctaaggagagtgggaaaggcttataatctctgctagggtcaggctgaatcaccaagagaaaagtcaggtgctatcttgacacaagcgcacagctgaggcaatcaccaaagagttgttagctctggctctccagcgcttaggagctgtagacttagacaatgataattttagttaaaggccaaagcagtaagaaatccccaagtagttatggtattgtgattgtcatgggctttcctcgtgctgaagaaaccctattgcagatgaaagggctagagatgaaagtactggggtgacaaagacttgtatccaccacccccaaggcctcccccaaaaggagagggagacttcaaagagtccagttaacagttttttccctagttattttttatagactgaaaaatgttttgagttttagcaaggcttaaggtgtagttacatcccaacatttaactaaaattgaatgtagagggtttcagaagtaagaggacatttaagaaaatgacaagttatagctgtgtgatattgtatctttagaaaggcttcaatagtacattggctacagatggtgaggctgaggggaataatgtaagggaaggaaaagaaatatctcttcttcctatttttaagatcagagctgaagagagattatcaaatgcacacaagttcatttagtgccaagtttccctgacctctgaggcttccatgaggaaatgcagacccaggaaaatgggaagcctatttagttcagtgctaaggatttcataaagaatagacagagaattctaagtgaacaaagatgttcttatatagggtatagcttatgatcctagagaaataaaaagcctgcatgtgaagactctgctccatgtcctgtatcttcaaaacccatcaagacatttgctgctgccataacagaacacttgaaaacgagatgtttacaaactacagctggttcgttgtcacatagttttggagtctgagaaatctaagattaaattctgcctctggtcataacaattgtgttaggttattgcatgctgaaggacactcaagataacacaaaagagatggaggggaaaagagaaagagctacacacatccttttcatcaggcactcttctgccatatccttaatccactgatgatatcagaacccatattacccaatcatgtcataacatcctatccacaatttgtgggacactttcaacactcagcaacaagatggtgattcctacctctccaagagaggcctcatgagtttctttggtggagaagatcagagagtgaccatcctggttctgctggttttttttttcaaatgccttgtttgaggcaacatgtactgagctccatggaatagaaaccccattttctgttgtcatcagcactgggattcatttatggaaaaagatatgaacatgttataggggaatctttggaagcaagtagagggtacaacagtgaagcaggaaaagtagacagaggctgtgtgcatgtgctgagagacagtggcccccgctaagttaggggaaaggaaaaacccagaggctgtggtattgctacatacagagttcagaatatgaagggttggctagggtgtttgagagatgtgttttctagagatgagatttacaaaaacttgttacctagaagggcagaagtattggctatgtccagattctcactgttggtcttgagtcacagtaaatcttgatcagttgagggtcattggacagagctagattgtactggtggttactctgggatccactaagaagaactgggatggggctggggagtgagtacctctgtgaagacactaaattactgtcacttaaaacagattggtagtgtaatttttaagcaagtacatggctgtatcttcattacttagaaaatactttgtttaatcaaaactgtgtagctaaaaaccgtatgtatttaatacaatgtgttacttctcacaaacagaaacaacaacaaacactcatacctagctgtgaagtgctgtgtggtataaacccaacacaggaaactgagacaaatctttttacagaagtgacagcacggctaaggtttcccgatacctacagtttgtttatgtgaaaagtccaatagtagcagtgtatttcagaatcccatcaatagcttcatcaggttctgcagtcaacttagcaaaagtatggagacttccagggtactatagttaaaaaaaaaaaagttatttttagaacagctcttagcatatttgttatgcaaaatatagtgtggaagacaagaggtatgggcaggtaaaaaggatttactgagaacagaagcagagacgatgtactgatatattgtgcaggggctgcagataagttcttgcagagtgtagaacagctggggacagcacatatttgatcttatctcctgggctagtttacagcatacgttgtcttccttggggctgggcttttgggtagaggacgtggtgatctcttaagattgggctccaaatatttacctcgttgaaatcacattccaagtcatcatagcccagttgttaaagtataggaaatatcctattgctcttggcctttggctatataatattcttaatgctctgaatttgtaggtggataattatctgtggttttaggatccaatagaatcaaaatattatattaaaaaacattttttaattaagttaaatgtgcctttttgaattgtattggcaaaaagtgagaaaaaaatcaaataaaagagaaaaaagggaccaactggcaccagtggctttgtctcctcccttttgccagcatccttgtgttctgaaggctgtgagtatcaactggaagaaagtgctgactctgtcctggtgccgtcggcacggtttgtgttggcaggcctgcttcttcagatgtgcattgggatattggccaatatgctaaaactgcagcctcgttgccatttctctgacttcagcatcccgaagtggtgattttcggctcttatctccctgatgttggttccccagcaagtctggtacatttagatgagccattagctcttaagaggaggctgcaacaagctctgctttacatcggtggcttattaccatccttgttcacggtgattctgtcaatgttacttaatttttagctttctgggccctccctcattaagattcagaaggctttgagtttctcttactgattccaccaagctgtagaatccagacatgtcttaattttactttgttgaaatcagtgaaaacccagggttagttttgccattaaaaaagaaaaaaatcctggagtgtcttcaagtcttaggataatgaaatgcacatttagaagtgtgcatgtgtccctcagctctgtcctcagtaaacctgctagtgagtgtgcttccttcgatttaataattgcagcgtttgtgcgtggttcacatggcagcattttcttattcaccccatgtatcacatgactacgcatctttatattaccttgatttacatcatcacacttctgtatctccctatgtacaacttattaatatttgaatttaatagttgaaaatctaatgctggacatgtttgttatggacatcgatgttactgtcacttgagttatgactgagaaaattactgggaggtagaaaaaaaaacaaacatggttgtagttttgcttattttcagttctttttgttattcagcttaaattaatctggaattagcagttgggttttgtccttggacttttttggcatcattgtgagcagactctttctccatggtgccttgtggctctctggcattaggagctgttggttcttcagctgaagtagaggagtaatttattcaacaagtcaattgccaataaattacatggaggtccgtatttctgaatcctagactcttctgcgccttggccttgcattttcatttgtcacattaaatgagaaggaagtaactgtcagtcatccatcaatgcatttcaagtgtaagattgtgcagggagtcaacagttaagctaaggatgtgcagtttaaaacatggaccaggaacatggggattcatggacatgcattaatatagagatattcaattgaagccaaagataatctcaaagtctacatcacctgaagtagactatttttactctcaattaaggagtaattagagaggactttaaaatattcttgataggggctagagtgaagatttagtggttaagagcactggctggttttatagaggacttaagtttgattctcagctccaaagtggcttttaactgtaacttcaattctaggggatatcataccctcttctgccctatacaagtagtttatatgtatggcacacagacatacatgcaagcaaaacatactatcaaatatatataaagattatatatattttttatttttattttaatacgcgcacacacacacacactgcaggcttttattattgttattgtcattggtaaaatagggcctggaaatgcagttacttggtttcaataccttaggagttttgtagaggcttacatgattaggttggatctgtggtagcctttataattgggtaatgcctttcaatattgtattcattcattcgtgatgatggaaagccagtggagaactagctgttctcattacctaaataagctttgatcctgtcgttgctgcttcacttcaggggaatggggtgtttcttgaggatccccacacccagtattttcacagtgccgcactatcactagctttgaaagaaaaagagaaggaaaggagggcagctctctgttgtgagttcttacaggctgtgagctatcagtctagagggactttgagggagatggtggctctgtggtttcaagctatctcattctctttgtgtttgctgtttcctcttctttgttagctacctaaaaagtaacagagcagttagttagcaaaatctagaaatccacagagccaatatctgcaataaaatccaggtccaagaaagtctccaaacaaaactgatgacaggccaccatcagccacaggacctactggattatcaccatgtcagggaaagagaaggaagcaaaagtgcttgggaactgtagatcctctagagacatcacatggtttgtagaaaacaggactgctgcttttgagcagaagtctaccattgaggtgcttctcctgtccaacttccatgtgatagttttgtttcatctttccatattttattttgttatattttaatattatcttttagaagtctcttctttcctagtaagagacaaaaggggagtgaatctggataggaggggtggagggaagggacttggaaaagtagagggaggggaaactgtattcaggatatagtatgagagaaaagaatctattttcaataaagtgagaaaaaaaccgtacctaatgttccaagaaatgcatctggcatttaacaggttgactcattgtgcagtaatttccagtaagttcctttccattccatgcttcccgccgtaacagcaacagctgtctgcttttaaacaacaaaacactacacctaatgtgcagcgggagttgagtttgatggcaatgatggcttccattatcctaggtggtgggtttctctttgccaaggcattgcattagcactataaaatagagaggtgctagcaaatgccgttaggtggctaattagacgaagtctacaacaatgttttaccatttcagtgcaaaatattaagcttaaatcatttccttggctctattccaactgcagaattacattctcttataccaaaggtcatctcccatggctatgagaagagtcacttttcatatcttctttggtgttgcgataaagtttatagagccagtgaaatagcagccttagattacaactttggatggcaaacagttatattccctgaacacaaaaattactgaagaaattaaaacatgctgtttctatgtggctgtctcctttataatacacatgcactgttagaagcaatctaactccactgtatgccttaactctgggggaaatgatcaggggtctgttgggtttttggtgatgggggaagaatagagaaatagtgcttctttattgcttgattagattggccctggttttctaggtcctggatatagttgaagaagagtgtgtaatgtgcgattggacatttgagtggtacctttgagtggtttctctctttttattcaaatatgattctacataggtacccagaatagataagccagaacagcatagaaaccacagaagacatactatatgaagatctgtctatgaaacacccagaataagcaatctcatagagacagaagctatattaatacctggcagggcctgggcatgggtagtagtcatagagtatctttgaagagtgatagagtcattgtatatgtaagtagacagggttgtggttgtttaagtagaagtggactcataaccagtgagttgtatactgtacactactggggagttggcagcgaagcttggaacctggtcatgtggctttctttcattcatctcagggctacaaattcaagtcctctggactcagcgatgaatgcctaaccatagccaaacttagttacaggccgagttgaagctagagcacattcttcatttggtatttctttgtatgttaactgcctatgctaagagcaggcacaggagcagtggaatcacaaatccctatccagaaataaacagtttcagtttgtaaacaagtctctatgatgctgggtcacttgccattaaataaaaggcagaaagtgggaccagttggcacagtgcattcacatacgcatcattccgtttgtgttatatagataacttctctgtctccttataaagagggcaatgaatccactctgcgctaagtgtggaagcaaactacctgagtagtagttcagcattctgctaataatctgaatatgtaactggatcgccaggactagagtttctgtctgtgttgaatatgaacactagaattgttgatagtataaaattaggcttagaaaacagttgatggaatcagataagagagttggctttgaggattctaagcatatctcacatgtaaatggttatagatttatcatcttgccaggtatggtgacacatgaccttagtcccagcactcaagaagcagaggccagccttgtctacagagcatgctgtagcactttcagggctatgtaaagacaccctggctcaacgaagcagagaaacaaacaacaaactaaaacaccaatcattttgaaatccttaaggaaattgcaacatcatacatcatattacattttaatctgggtataacaatagtttttctgcttggttgataaagacttgagaaacttagactgttttcctaacagaatcctgaggtggccctttgcttcctctcctctcccctcccctcccctcccctcccctcccctcccctcccctcccctcccctcccctcccctcccctcccctcccctcccctcccctcccccctcttgtgcttttttttttccttcttcagaaagtgtctcatgtagctcaggctagcctggtatgcctattcctcttgcttgtatctcccaagtcctggggtttatgggcctgcacaccatgcctggttagaagggtttgttcatttgactgctttgttttcttcctcagctcttttgagatttacttagggcctcaccaagtagccgaggctggccttgagctacatataaatcctttgtctctttcttgtatgtgctgagattatgggcatgcaccttccatgtccccttccactgccctttctttattattgattaaaatttctcccaactagaatgcgtggtagcttgtgggcagcataggctaagcactgacctcagtttttaaacccaattcaaagtatgtcctctggaatgtcatcactactcttgtagatggaaatcagtttactcacaggaatcttccagtaagctttccaaaactgtaattttgggatcaagttttaaaatatagaataaagaagctatttagtggtttacttttaacacgttttattaaattatggcataactgaatgtgtctttcatagagtctcaattaccctttattttcctgatactgggcttttcaaaggtatataaaggtatttttggcatttaatgaccgtcaccttacttctgctcagcttttgttgtagatattgttgtagcctttttaaccagaactgtgaatttttcaacctatagacaacatctggggaagatgtgagagatttcactaaggtgctgaagaacaagttcaggtccaagaaatattttgccaaacatcctcggcttggctacctgcctgtccagaccgtgctggaaggggacaacttagaaacgtgagttctgttctagcattcagtttgtgcgtgcttgcacctcattgtctttaatactagtgctaacaacatgaaacaaattgcatcttttcaaagagatttgtgtcctgatgaaatattttattttgaaacaagttgctcttcaacagttaatttgtattatctggggatttttgtttgttgtttccgaatgtgtattattatttcttcctcctcctcttctttctcctcttcctcctcctccttctcctcctcttcctcctcctccttctcctcctcttcctcctcctccttctccttcttcttttcttctctctctctctctctctctctctctctctctgtatttagaaatatttgcccaatcaatgtggtattatttgctccttcattttttcatttatttcccttcctttcttccctttcataggtttcaatctttttgttataatacctttcattattttgtttcgtgttgtggtactggtctgaaccctgagccttatacttactagagaaggactctacttttgagttatatcctcagctccacattatatctttttaaattaaattatcaaaaatatttcatcttacacttcaaatgcaactcttctctgaaccctcgttttatgtttcattgtcatctccttaaagataaagttggcaaaaatgaagtatctttatgcatctatgaagcagacaaaattgcttacaagtctgcaatttgagttaacaagcatcttctaagaaattaggagggagaaaaaaaattacaatgggatcataaagctaagaaagaaaacaaaagactctagagcttgaaatgagatgaagaaagatgttaaaatgagccagaagacatacatacatggacattttaaatcaccaggcagtcttctattgagatcaaagtagatgtgattttaactcatcgaatccctttttaaagcatgtacttcagcgtttcaactgcaatgctttttgtatgctggagtgtgtaagcaaagcacccatgtgactatatgaggggtgattgattaaggaagacacccagcattcacctctggcctccatgtgtaggtatatacatgcatacacacacccaaaaaagtatgtacactacccacaacaatacattttttttctcattgcttccataccacataagacaaatttaacatttgttttattttaaacaaagctatttaaatacatttagaaaatgcatgtcttttgtgaatatgcttttgtctttaaagagtgtatattaattattcttgttgttgtatccgatacaagtttgacttcctgaagacctgataaagtctttcttctgctctgatcacatcgacttaacctttgacatagctcattgtggcatatagtgttgtaggttgactatcacatcgtgctgggatctaagagggaagagagtagacttgtattgagcaatgttgccttgcactattttcataaatcatcgccatttttcatcccaaatatctccacccttcacatgagccatagatagatggatatttcctgctcctttcttttaaattttaatgttttgcctttacatgtcaaaatgatcatgacatttgatttgtgggcacacacttgagttcatctgtgtatgtggagcctagagattgacatcagttgtcatcttcaattgctgacaacttattgattgagacagggtcactcactgagtctggagcttgctttctgagcaaggctggctagccagcaagtccccagcatcctccagtttctgcctctgtactgggatcctaggtgaccagattccatgtgggtcagggggttgaattcatgtgttttgtgcttgcagtgaacacattttactgactgagccatcttcaggatccacttagagacttttttttccaagtaaaaatgaacagaaaaccatgcaaaataattacattctctgcttttgatatactacgctgaaaatgcctcaccctgattaacataaatttcccaccattttccaagagagatacaagaaggagaaaggaaggggcatctgattaaattggatgccaccaaatcccttttgaacaagatttatgagctactagatagtgtgggtgggtgttcttcaaatcctatgcagagctctgtggatttgctgtagttcatttttctgctgaaccctcttctgctccaaggtcacttaatcattccagtggaacaatttatgtgagtgggtagggttttgtttttttgtttttttttaaagaaaaaaatgtttgatttcatttattctcctacttgtgggaggagagaacattggagaaaaaccattgaagtggtgaaagtgttgaagttatttatggagctgggtaaagcttcctttgacttctttcatctttgccaatgtggtactttaatttctgaccagtgattagccatgcaggcatgcatgcagggactctatgaggagaaatgcttattactaaatgggggtaaacatgtccatgctaaggcttattcagttaatttaataggtctctatgcaagaattttcaaaatgagaaaaatttattcataatgaagttgaaaaaaagagctaaaataaaatggtggcaggaataatttgagagttctgagagattattagtgactttagaattagtttagtttccctagagattaagaaacaacaagaaacaccgacttctggtattgggtaatatatccatagtgaatataatatataatatatagtgactgagtcactctttgaagaatccctacagagcaggcgcagttgtggagagggatgttcaaggctggaagggacggataacgatgctgagacctgcctgaatcatctgctgaggactcaggatggccagaggtgaaggaaaagactcactggccaaatgaatcattttcaaaagcctggattaaagttctaacacgaaactaatatcaaaaacaaatgagagaggcagagccagatgataaaggaccttgttatctatgctcacatctccagggtttaacttgagaatagtgagagagttcacaggtaacaattacgagaaaagagtggtggatggttcaggaaagatgttgatatgaaattacccttcagaaaatgaactttagtaggagcaagggggcttcactaacacaggaaccatggtcatggcagagcattttgagcaacaatatatcatatcagaggtatcttgatgggcctgaaaggtaggagagaattatagaagcattgcgaaagtttgcctggggctagggagattccctagtagttaccagcctgatctgctcttccagagtttaattcccagtgactatgttgggtagctacaaccacttgtaactctagctcctggacatccagtggcctctcctggtttccgaaggcacccaccccacatttggcatgttcagacatagggtagatacagtggcatatacacagacaaatacaaatataagtcttgaaaagaaagttactttaagttgaatgtgtagaagaggtagtgttagccattgtagacagtgttataggtagtgttagctatagacagtgttataggtagtgttagctatagacagtgttataggtagtgttagctatagacagtgttgtaggtagtgtaagctatagacagtgttgtaggtagtgttagctatagacagtgttgtaggtagtgtaagctatagacagtgttgtaggtagtgttagctatagactgttgtaggtagtgttagctatagacaatgttgtaggtagtgtaagctataaacagtgttgtaggtaatgttagctatagacagtgttataggtagtgttagttatagacaacatggtaaaggtggaaagtacacaatctagagagacagagaagttggggagcttggctataacaccacatgacgcagataggaaagtatatttgtttacattttcacattatattttatggcatgcgaaccagccagaattacagggtcttgttaatttgctgtcctcagtggacagactgactatagggagtggagagggagggggtaagactagtctggttttcaagcaccaggctatgatctaacaggtagaaacagttaacagctttggagcaaatgggttaaagaatcaaaaacacggaaatatgaggagactgctggcaatttgcgtcattagatgtctatgttggaattcatagacttacatttatattagagtctgattcttctcatagcatatgaaattagtcaaaccccccgctgagctgctacactgaaaacaggaagcagctccattttgaagtcagtggtagctcacagattgatgctgcctttattttattatttacttctctgcatttgggtgctggcagtagcagtcagagactcatctatgccaaacaagcagcctggcaagtgagctcaacccttcttactgtaggtcccagggatgaagcgcggcgctgctgttctttcttcctactgagtgtgagcttgtatcacaacttctccctgtgagccaaagtcctctgaaggcaaagaaacctaaagtttgattttgtatctgtttcctttatttgatattgtccgtgaaaaatgttcttctttcagtccagctttctgcctgttccattcttagttcacaaatttttgtgccaacaattaacttcctaagaatcgctaaagccaatccacaaagctttgccagggtttcttaagataagtgcatatatatatatatatatatatatatacactcacaattttttttctgttgaaagcttatattgaatgttgtcctaggcttgaattttagagataatttcttaagcagttgctgttttaggaagagtgacacagggtgcagagctgtctgtctcttgccatttgcaaggtttcagggataatgagaagtagtgatatactaaagacgaggaatgatactgtgtctccactgtcccggcttctcctttacatggacacagttaactctatttacagaatacatattttggcagacatagaggatgaatgcccacttttgaaagcagatctaaagaactttagctttctacccaataagatgacctccatctctttaatgtctgtagtgcacatatcatcttgtgcttcacacagcaggagataataagatcatagttatgtctccagtccacatatgtaatagaaaaggaaatctgaaaggattttgcttgatcagcaatagctttttcaagagactttacataattagagtactaattttccttgtgcttttaaaattctacattcatcaggtaattcgtcaccaccttctctcaaaagttaagagtttgaactactgtttaattgggatgagttgtttcaatggcatttcatggagatttgaggctctcaggggatctgaaaatctagggcggcccctgcactgcctcagacccaagcccctgattcaagcagagctggttggcccatgttgtttcctagagcgaacttctagttaatagcatcatagtggatggaagtctgtcctgtcctggcgaggtcaccctcagtgtgctgatgctctgactctgaggagggcataggtaggaaggaaaacttttcttttccatgtgtttctgaaattgagaaatgtggtgtacacataatttaaacttttatatttctgaatgaagagccataaacccctcttacttcaattctgatgtcaatagtctagtaattaggtaataaattcacctttctaattcaatgtcttttccaaggaaaaaaaaaaaaaagaactgtgtctcccttagaatattctggaacatcatcttccaacagcctataatgtgggacgatcttagcacatttggctgatcttttcactctcactgttctaaaacatgatgcccatcttgacacatggatgctgcaggtgtgggaaagttgctttcagtttccctggcggtgaggtgatgatcaaggaagccaaatgagagtggaagacgaatctgcctccgtctgcttttgtctgaaatcgctctaaatgtttgttctgtgacttttgtctccctgtcccctctctgcagtcctatcacgctcatcagtatgtggccagagcactatgagtgagtattcacagccccctgtgcacaggcggggagttctaatcaggaatattagcatgggtctaaactactacttttacatcctgggtgacagtgctggtggtttgtttgcatggcagattcgttacttaactaaccttctaactggtaacatctgtcaatattgagaataaatcctttgcctttttatttcccccttttcagcccctcccagtcccctcagctgtttcatgatgacacccactcaagaatagagcaatacgctacacggtaagagactgataaccatcccccactctgcttttgtagtagttcagtgctgctgacaaaccttgtggtaggagtgtatttgcagaagtcatggttctattccatgtggatcctggccttttatctattcatgatgtaatttgtactttaccaaacacctgctatatattctgtgaagagtagattacaatagactgccattacagagctgctgagactccaaacatcaagcagtcaggataaagagaatataacctaattccaatgaataaaggtagcatttggaactgcccttgggagactgcgcacatatgaattgcaatatgtaattaaacttatgctaatatttgattattagggtttgtttttaagtccctaagcagagcaaactatagatctgcatgcagtgtgcaaaactttcaggaaagtgtgtaaaatcaaccattggtcatactagaaggcagctgtctccaaagtccttagtttaaaagctatttttaaaaaatagtcggccaggcggtggtggcgcacgcctttattcccagcactttggaggcagaggcaggtggatttctaagttcgaggccaggtctacagagtgagttccaggacagccagggctacacagagaaaccctgtctcgaaaaaaacaaattaaaaaaaaatggtcacatttgtgctgaattaagactaagtcagattttttggagctgttggataacatgctacagaagaatgtagcttctttattgaactacagaagggagaggagtggagagtctgtggggttaacaaagaccatagtctgataacacagagcccggttgatcaggagttggttcacattctaggtcaagagaagtcatggtgaatcttcagacctgagaggaacaaaattaggtttgtgtgaaaggttgctctgtttcagtggagaccagctagagggcctgagggctcaatgagaagacctcacactgtggtataccgcctacaggcccaaagtgaatggcaatcaaatttcagctcaccagtacagatggttttaattccaccactgagtgagatctggactattttctgttaggtcataatatagatttaaaagccagcaagggtgcttctggaggactgttccagttgcagccgtgtaatgtcatcttctcgtttttgtgtttccagactggcccagatggaaaggacaaacgggtccttcctaactgatagcagctctacaacaggaagcgtgtaagtgcatcgtgcattgagtctgcccaagaggccaactgaaatagttggggttgtgaaagagtatctcagagattggggccaaggaaggccacagacaccacaccatgcaacagacctcatagaaaagatttactggggaagtgaggagatgtagaaggctgcctccgaggagggatggaacaacagagagatgggccaggtcatgatggtgggctttagaggggatatggagcacatacactgggagggtatgtgatggtggaaacgtgtcctattggtgatgactgggccatggaaggcaggaaggaacctggttctggaatgtgggaggttcttggctgactaaccttgcctccttgtattatggtctcaggattaatcttcatagatcatggcatctgagttgttatcccaatccaaactgatgtgtgtttcatattagtctatgcacattttaacttttaaagccatgttagtgtaaatgaagcatgtttatttacttaggaatcaacttatctgctttagaataatcagattgctgcataattatataatattgatatgtatttttgtggatatttatatgttttatgtttgtatttatgtgggtatgtacacatatatacgtaggttcatatggttgcacatgtatgtggaggacagggataaatattagatatctttatcaattttctcctatttatttatttgagacaaagtttctcaatgaaaatggatctcatttatttggccaccctataagctctgtctctctccaccccccacccccacccctatccaattccctcaactagagatgtgtgctaccacaccccacttgtacatcagagctgggatctggactcaggtcctcattggctccctggctagtgttttaccaacctagccgtctctcgcacccatagtattgatagttttacaaatttattgatagttttacaaatgcacatccaggatcaacacacttttgtaacttcctctctcctgtgcgttctaacattttcttcatagtctctgctgttaacagtgccctccacacatgcttggacagactcattctgccattcactgaaaaataactcccttacaaatattttattttatcaggaagtggggaaagcttcattgacttataatatcttttagaaatagcttcggagctagatattttatatctcatttccttatttgtacatcttaagcttggctgtggaatgctcttggcaaacgcttcctctctgatgttaatgttgtaatagatcttttctctttgggacttgttttgaccttgtttttttatgagatgatgtgtaaaaaggcttgtatagtttcaagttgatgtgacttgtaggctcactatggttttgaccagtcagggagcccaggagaacctgagaagctctagaatatagtgtgcacatgttctcactcacaaagacggaagaaagccaagtagaataatacctcaagccagtggttctcacctttcctaatgctgtgatcctttagacacttcctcgtgttgtggtgaagtagcattcattgctacttcataaatgtaattttgctactgattggatcatagtgcaaatatttgctatgtgacccttgtgaaagagtcactggactcccaaaggggttgtgaccctcaggttgataatcattgctaagaacactgataaagaatgactcccttaagtctgtttcatatttcatttatcattaagcttataagtagaagctcttgggaacttttttctattttaaatatcaaaagtttggcatcttaggcatcataagtcatggctgaggcattattattcaggtgttatgaaccagaaaccacttcagctcaagataataaaatatttgccctgctctttcatatataacctaacagtaagtgtttcatataaagtaattaagttgcttaaatatctcttaaatcaggctagtcctcacctcaccagtgttaaaagcagcagggaatttaatgaactgaaaaataatagttatgataaaaatctaacttcttcagaacatttgtgttcctttctatgtgggcagaacataggaaatacaatgtgcactgtcctttagttttctcgcgaatgtgtcagaacggagaagttatccagatgattagcagctcaacagatttaacacagagacctttggtgtggtgattcattcaacagatattcattttattcctagacggtagtgaagtgatggagccacttgtgagaggcagctgttacactcaggacgtatgtggcctgtttggcagagccctattccagtctgtgtattctctcatgtatgtgcattgataagtaaattaagtttagttttaggagagagtgctcagaacccaccagccctgtttttgttcttattgtgttttgttgctgttattttattgtttgtttgtttttattttcctccctcttttatagacagggttttactatgtgccacatgctggcctcagatttccaatcttccgtctcaccctgtaaagtgttctggtgacaagcatgtgcttccagctccttttacctcattgtactctcgctgcccctgggtgatgtttagtcggggggtgggggggtatgcagctgtgtatcttccgcatcttctgcacacactattgaagggtgagcttgctcaccatgggagacctccaaccacagagctagcaaagatcattcaccaatatttggttttgggttgttttttgtttatttgggttttgtgccttcagctatagccaacatacctgtagttggaggtggctttcatccttcaagtaggatcatggaaacaattccctgtcccctctccaagtactcccctccatgaaccttcactgtgtattgagcattcatgtatcatatataccagtttcccaaaattgacccctacataatccagtcccaagtactcccctatttctctgaaagccagactccagatgatctgttggggcattagttttaaggcttctcagtatcttcgtaggaagttattcaaatacatcttcaggaggggcaagactcagagagacccttagacagcagtccctgaggccgttaaccagcttctcactccatccactttctgcctttgggtgatgctgttttatgtggactgaagttggggcttggtcatggtctacctcaacattaccatttgtaaatctgaaagctggaatagagcattggttttaaagttcatcaagggaatcacagctctttcatcatgtgacaggtactaattttgtaatgtagatagtatttactatatgtatcacatacagtataattatattgcatctaatgatacctcttgatacaggctacatttaaaaaaactttctatttcagcatgatgcacactattgatgtttaatagccctaatctggtgcatgatgtatcatctgcataatgagggtgctcttggtttttattatacacaattaaacactagaacagatctatttttgtatttaacctttaaggctaataatctatgaaaatatttaaggccaagattttatgctacatgtaaattattctatttttcattttacagaaatgaccttaattctcttccagacaccataacaaacaatgtagttagtggccatgataattattacaacgccctgtacatcaagttcacaaaggaggcgaatttacattaatactgacaacaaaatgcttcccaaatagagaagttcaagtggtttcccagtgcccagattaaaaaaaaaaaatttctcagttgtgtgtgcatatgcatacttgcatgtgtacagagaccagaagacaacttacaggaggctaatcttttcttccaccgtgtagcttgcagatgttggaacctaggacatgagcaagtactcttaccacttgggccatcttgccagcccaacatttgaaaccaaaagtgtggtttatgttattacgaagcacctagtccccaggcccaagtgtctacacaaatgttcttagggaataaatgatctctgctatctcccaatcgcaggggctctagtccaaatctgtggccagtcctagccataagataattcaggctattttgggggtacatgatttttattcagaagattcttatgatttatcctttttaaggtattgactttgagttttttagggatagtatccacaggcattatataactaatttgacttgccttttatttatttcaataactaaatctgcgtcaatctgatgcgaatgactgaggtaggattccacacatcacccccttgtcattgaatcttaggtatctgggacaggaggggcccaagcttttctttcctttgtaaatgactgctcattttgctttgatttttagtggattactcatggtgttttatccttaaaacatagaacatttactgacataacacattttccgctttcttggatatcccattgtttagttgcttgcttaggtgtgtttcagcctgaaagggaatatttgcagtatgttctgctgtgctctcattttgcagttgctttagtgtgtgtgccctccatccttacaccttgcccatctgttctgtcctcgatgcatcttggactcacatcttttcctactgccttattttccacttgatctcagagtggaaccaccacccatgatacacagtctctaactcgtgtctcaggctatggatttattcatcacagggcgtcagggcttcatctctgcttctgcctcttcaagtacttatgtctaggctactgatcatgaacttgtgtgtgtgtgtgtgtgtgtgtgtgtgtgtgtgtgcatgtgagtttcatacacatgaaggtcagagggcaacttatggaagttagttctctccttccaccttgtggctccgggagagcaaactccagtgatctggcttggggcaaccactttcacttgtagagtcattttccttgccagagctctgtttcattcttctgtgtgggtagctgtcttagggtttcgtcactgtgacgagacaccatgcccatggcaacttttatacaggaacacatttaattggggctgccttacaggttcagaggttcagttcattatcatcatagcaggaagcatggcaacatccaggcagacaggattataaagaagatgttgagaattctgtatcttgatccaaaggctaccaggagagaactctctcctatactgggcagagcttgagtgctaggagcccttaaagtccccacacacagtggcatcagcactcctaatagtgtgcttcccatgagccaaacatatccaagccactagagtagcctagaagttttagctgctgtgcaggggtcgtatatcaactttcctgctcttctcatcctttgaaccctcaggacatcatgcgacttcttttgttccctctagagatcttgcatttactatgaaaggtgagatgacgtcatggccaattctatcttttgtgtcatctacctgctgtatttttattttccaccatcattgtaaacaaccttcaaaagaccctctttaaaaaggccacatttgtcaggagggagggaagttaagttaggctttaagcttagccaaagtacatgagttttatttttgatatacagtcacactctctcatatgtgtgtgtgtctgtgtgtgtgtgtctgtgtctgtgtgtttgtgtgtgtctgtgaaggaaggaaagtgagagtgctcaatgcaggaaggaggcccattaagtcaccaagaatttctccctctccctctccctctccctctccctctccctctccctctccctctccctctccctctccctctccctctccctctccctctccctctccctctccctctccctctccctctccctctccctctctctctgatctctttgcctgaaacacatttttttctaagaacacactaaatcatagatgcaatttcagacccctgactatcagaacaaaagtgtgatatgccaaggatggattttctatcacacataagaatcagagtgcttgcccagtatccagtactgcacaagagcaaaggggttttaaggtccaggtggaacaataaagttcccagactgccaggctctccttggctgttttagcacagagtctgatccagggctacagcgaaagatgctgagagaaccgtacagctgcacagcttatactgaaggctcagccataggacagctccattttcaactctggtgaacacatcagttatgtcttattttcctgatgccttatcctttatttcccctcttgacaaaaactatcaaaccaggccatgtccagtatgctagagggctctgaaatctcctgagccaggagatggatgtgacagtcataccttcctgaggacatccaactagatctgcctcacaaaggaagaacagagattccagcccagctggaaagctttttcattaccacagacatatttggccttgtctcccttcactcttctgctgctgacagtcatgcatcaacactactgtcgatgtgtctagttcagtaacagatcattggatgaagaacttcaatgaattaaatgtaattaatgatttaatgcaggatattgatcctaaaaattagttatgatgacaccaagtaaaatagctactgctattttataaatatgtacaattgtgtttatgctgttatttaaatagaaatacgttgtaaatcctttgggttatcaaacataggaaaactggttatagccaaatcaaaagatcagtcattcttggtgctgtgatcttttagtccactgttttggtagtcagtgggcaatatgcttgcctatatcatctttaacttttatgttaactgcttctaggtatgtccaacccattgatatttgtaacatgttcttatctaaaaatgtggtggactacatttcaagctctcctgagctgcatgcggcttatggtcataggttgggtgcaccccattaagcctgatttatagcaacttattactcttatttataggcatggatgtgcctttttttttttttttctgttgagtggaatggctctctggggattgtgagaataacaaattgtggcatgagagttttgatatgttgagctcatcctacacaagcactgtagcatgaactccagcatccagctcgagtttcaaaggatggccatggagacacagagttccgaagcagcctggtccagccaccggtccaggcgtcacaggttttatttcttgtgtgctctgagatctcagcacccagatgtgagctgatgggcatcttccttgtctctagggaggatgagcatgccctcatccagcagtactgccagaccctgggcggggagtcacctgtgagtcagccgcagagtccagctcagatcctgaagtccgtggagagggaagagcgtggggaactggagcggatcattgctgacttggaggaagagcaaaggtgagctagacccgggagaagaaaatacactactcgctccccttcccttccttctgtcttttcagagatgttatctaagacatcacaatgaggtccaagtttgagaggacattagcaggctgggatgtgggtagggcctcgtgcatctgtgatttaatgatggatcctggaaaaactcttgcttgaagcccattttctccctcctagctcttcgtgctaataaatgtttttctatgagatgaagagtatcaaactaaatttggagttcccaggcagtttgggggagataattatctgataataattctggttaattttatatttttccctttccatattagaaatctgcaggtggagtatgagcagctgaaggagcagcacctaagaaggggtctccctgtgggctcccctccagactccatcgtatctcctcaccacacatctgaggactcagaacttatagcagaagctaaactcctgcggcagcacaaagggcggctggaggcgaggatgcaaattttggaagatcacaataaacagctggagtctcagctgcaccgcctcagacagctcctggagcaggtaggggtgtggattcctgtgcagcacctccacaggacccacccacccacccacccacctcactgaagcctggacccgtcaattcatgagcaacacagttaattctgtgtatgagtggaatctccactgatacaaaattgtctgttttcctatctgactcatagaaattctttcttcttttgtactaaaatatcaccttagaacagtttgactttaaaaaaaaaccagaatcctgtggtagccacgagcctgactttcatcaggaaagattccacagagaatagggacagcaggtgacctacaatcttcaatctaacactttcttccagagaactaggactaagaaggtacctcagaaatcactgtctgtaaaacaacgacgacaacagcaaaaggaagcagaggaacaggtggctgctagtttgccactgtcatttcttacacgggggatgctctgctatagcagtgacttggaaactttcttgacaacaagcagtacaattttcattttgaggaaaacgtatgtttctgatgagtatgaaatgatgcacacctttaacagagatggatgcacacctttaacagagatggcgtctcttaccctcctccccttccccggccccttcctccctccctccctccctccctccctctctccctccttgttttctcttgctttcctttttataatattgggaccgtttttaatactggcacctttcttttatgattaaatactggctaataactgacagttttgagaaactaccatcctttggtttgtggcttctgcctttctgcttctgcccctctgtgagggggaagaaacaacgtggcaaggagccacaggcagagagttaatagtttgactaacttaactagaagagggcagtcagctcgcagagctaacagggagaacacctttgctgcagacagatataatgttgatttccccacataatatttcctgactggcaccagcagtcctagcacggttgcctttttctccagcctgtgtggggtggcgtcctgtgacatcctaacagagatgccctttcccacatgtgctgtactgcattaaagaaaaccatttctccggggatttgcttacgtttacgaaagctgtcttggcttagttgccaccagggtctttttatcttgtcaggaatcttgaaagcattataatttttgcattaccaacatagtggacagttgatccctttccctcctttggccacttgcttttctctctctctctctctgtcatcatagagtttctttgatataactgtgtgaatcatttacttaaaagactgaaaattctccatctttggaaaataatggcttgctaagtgagtcaaaacttggctttctgttaagacctcagactgtttgcttgatcctatcctcagtgtcacatatattggcaggggcgggtgttgcttgtagagtgaatttgaagttcccacgtagtaccttagtacagcataagtttccttgtgtgatctcttagagcggcagttctgagcctgtgggtcacaacctctttggaggcattggatggctcttctgcaggggttgtatgtaagatatcctgcatatcagatactcgcactatgagtgataatggtagcaaaatcgcagttatgaagtagcaacggagatagttttaaggttgaggttaccatgacacgaggaactgtagtaaatggtcacagcactaggaaggttgcgaatcatcaactgttgatgtccacagtttagcgtccacttggaaccatcacacaagctctgctcgaagcccttgcgtgctgtatacctttttgatgctcttgggaggaaagaaaaggttcctggactcattcttccaacctcccccctgccatcccattagaccaaggacctagtggctcataggccttcacaattacacagtaatgtttttggaactagctgatgtctaagtggctcagaatatccaaggctgtggagctcttatctcttcataacgatttagtgtgcgtgccagaagtagatggaaattttaactcaatataaacagggaaaactaccagacatcaactaatagggatttaatggaaaatctacatcaaagaggaatttctacattctcatattatagatcctgctttctattttgaccacgtacttatcagcatgcccttcggtagcacaaagatatgcacgggagttatcatggagggttcgccctgtgtcggactgggcaaatggctttggaaagactcatttatcactttcctggcaaaattctatgccgcggctatggcccataaagctttatttagcatctcttcctccgggttcttcatccacactaaggtgttaatgctaaaacagtttgtacacagcatctaacacaaaagtttctgtagtttgcctagaattgtactgattcttagtgctccaagttggactttgaattcaagctgctgaatccaaaatccagggggataaaagcactctctctctatatcgcctctgaggggagctattgaaagttagtacatttgccattttcaaagtacaatggcactttctgaaagatgaacccaaattacttctaagtttactacattggtgtaaaaataatgtaaaatttgggagatgaaaatggcagacataaagaaattctgtggtgtaagaagaagttcttcaaagcacaaacatggagcaagcatttgggtctcaggagaagtgttcgggccataacctaggctgaaattgcccaaggaccatggcaggggctggaggtgggggaggaatactgtcctttctaggttgcaggcatctttcttactctaacatcccatgtgattgcagcctgactctgactcccgcatcaatggtgtctccccctgggcttccccacagcattctgcattgagctactcacttgacactgacccaggcccacagttccaccaggcaggtaagtgtcactgaagcacagttgaatttggactaggctggagtttttatggttttggtgtttggttgctagcattcttacgtctgtgtgctctggagcatagaacattattctctttagtctgaaatgaatgtagatccattttaataataaaaaaacactttagtcataatgtgcttgtttataaaatgtgtaggagtggattcaattttggtgaaagatgaaaaatttctcctttcatttgaaataagcaagacttttattttgctttgagaatatttgtgtgtgtgctcatgtgtacatgtatgtgtgtacacttgtgtgtgtgtgtgtgtgtgcacacatgtgcatgtagtgtatgttcatgtatgtgtgaagatgctccaagagccagaggaggacatccggtgcccggctctcatcctccacgtgattgctttgagataagttccctcactgacctgggataggatgggcaggaagcctcagcagtccttctgtctcagctccctcccccctcgttactaagggttacgggcacacatcatcacagccagctttttagttggactctggaatccaggctcggtctcatacccaacgcaggaggctctcttacctactgagccgtctcttcagccccaagactggtcgtttgcatatatgtttctctacaacttttacattcatgtacatgcagaacctaatgctgaagagtagcctgcaacgtggtcttctctaccttatccatcctagtctctgtggacattgctccacctatgctctacagcagaagtgccaccaacaccatcagtgacagtgtcacctcactgttatgctgttaaaaacactattgtagtttcaatcatagaataaaatacatatcgagataatataaagcaagacaaaatagactgtgataaaagctccaaaatggaaaagaaagaaattgctagaatattttatgtgcaaaataatggatttttcagctagcacactagcgtcaaattcactgctacttatttttcactttcatattttctcttagtatataaatttatccacataaacatatgatacatttttaactatataaaagtctactgctggagctaaggatgttgctcagtggtagaatgttccccctatgtttttataaagatctatgtatcgttcctgtatgctttgtgtgtgtgtgtgtgtgtgtgtgtgtgtgtatgtgtgtgtgtgtgtgtgtgcgcgcactgtatcgttcctgtatgctttgtgtgtgtgtgtgtgtgtgcacatgcttgcatgtatgacatgtcaaatgaatacagatgcttctgttcccccagaagttgttcttttcaatgacagttcatatcctgttcctattttggggctggttacggtattttttgcctgcaagcggttctttggtagaaggatggacattgattctaagctccctccttcctccgtgttttgtctcagcatctgaggacctgctggccccacctcacgacactagcacggacctcacggacgtgatggagcagatcaacagcacgtttccctcttgcagctgtgagtagtaacacctttatgcccccgtggtgtgcctgtcctgtccttcctccttccccacttgcaactctcttgtcttctttcggacgacagcaaagccaatgttagagacaagattgcaggctgttttgaaataacacagacatatgtgttgacagagaaagtgaagccccattcagatggcagagagattctgaggtccactgatggtatgatcccggccttggagattttcccacaggcctcaaaagcgactaaatagagtccattagcacaatgtctgcttttagaatataacttgggttaagtgcaggctataagaaacttgtgttacttcaaagaagagccttgaacggcatgccaatctaggatgaacacagcttttctaaggtaactttctacgttccttgagatatatctccacatgtcttcgtagtcaggcacagaaagcaattatttctggcctcccctctcctttaaaagaattcttttttttttcccttcagggaataaaataatcattgtgtgaaaaccagatgattcacagggtcacaaattatgagtctgaagtctccatatgaacagccaggagccaaaaaaaatcgcccaatgagagcagtccaaatcccaggggaaattacataatgattttaatcgattgaattttttaagtggtttctctcctggcatcttgccacccttgagattctgctgcactctcacctcagagacctctgtggtctctctactcaggagctgtccacagagtccatagacacagactcaccactggattgtgacagtttcaaatacttttaaggagcatgaaagggtcacttatcatttgggggtggggcctctcaaatggatgttaaaaccagtcaatcagtaaactacagttttgtggaagtctctgttttttggtttactgttttctgtcagctccctagacaaatctaagtcaggagaaagagattcatcaattgttggtgtaattgataaacatgttaaatctgttacagtaattgaagttaaaggttgaatttcatctcagaagtttttgttctggcttatgtagtacccaatggctagaaaaactatcatgttttatgaattagagtttcagaattaaagtttctaaacactaatactttttagctgaactgccacctaaatgtattcatcactaaagagcaaattctgtaagtggaattctgtttagaagtttttatttaaatttaatgttggaccttttcaatttaaaactctgttggcagtgaaatcagagtgtgagatatgcttaaatctacgctttgtaataaatataaaaatataaaatgcatagtttctataatggaaatgtgcttcaagttcaggatttttcttttacgagtctttttttctaaagcacttctaaatctttcctaaggcatattctgatatgtatatttgatttttaaaatgttcatctatgccttgcttaaaatagaatataatggaaaaactataactgtataacacctaatcttcaaaggtaactgttgctacctcatgccctgacccctgatacaaggataaaattcccattgagttgaaccactcacggtgattggttcctgagaagaggcttagtctctatggagaccacactgcagtggctaaacccttcccttgcattgagacctctttacctgtgacatcatccttggcgctcactgggttatttaaagaggcttgcagttccttaagaggaaaactgttggcattctctggcagtgtgtatatctaccagtgtttataatgttgagattttctatacatgagcactcctagtcatttgttataatgaagaatccaggcacctcttaaataagaaatggtacatagtacattttagagtcctgtgggatccacagactatgtgttcttacttctgaaaatggcattgtttgttccttttcattatttatattcatatgtttctctggcaaatataaaaatcttcaaggtaaaaaaaatgctttccaatctagaaaaaaaaaaaaagaactccattgtcttgtttacaaaattaatgcatacctcagaattttacctaggattactaaatcatttcaaattgtacagaatcaattagtgcatggtacagacctggtacctaacacagacttccagattgatgttgtcagtggtttacagggacagtcatgtttctagctagagaaatataatggttgaaaatttcccagctagcacttagaaaggttttgcaggattcattagctttaatgttccatttaaattgctcagttagcaaatattttatcgagagtctgcaactcccaagcttcctgatcacctttggaagtttatctaactaaataggattggcatgctctcattgcctaaacaatctcttgagtttctatagagaaggagaatgttcaaattgcttgtagccagtgtgtgatggatgggctgagctgcatgttaatcttgacttttgatcctttgtggattaaacaaattgcatggctacaaatgaatttcactcatggcaattttggaattaaaatgagtgtctgtattcataaatcctaatagcatgaatagctctgttagcttattttttatattgtgtcttatatgctgttgtgtgtaaagacttttaaaacccttgcattttgaatcaatattgcagttagcaatggtagcatctttgaattatgacctcttaaaatgacattgaatctcaaagcagagacacaggcatcgccatcttaccctaacaattaaagaattgaatttaatttgtgttgacagttatccagtcatgtagtagaaaattctaatgactataactgtttctttgttggcataatatagtctgcttatagtttgttcaaatatgtggaatattaatagtaaattgagctttctttctttctttctttctttctttctttctttctttctttctttctttctttttctgctagaagtaatgcttttagacttattgttaacttaccttgtgtttctgctgtgatcagcctgcatttgtcaggcttgaatggcatccatcaaaaactcaagacttaacaaaagcacaatgattacctaattttcttttaaaatacacagcttgttccaggaaccgcctataatgttttatttgattaaaagagataggaaggcaaaatggctttgacttctgtctagggtttgactattacatatccattatttaagagagaagcctaactgtctttcttttcagatggggtgtatatttacaacatgtctttactaataattcacctcagctacctccggggtatagctcacatgaggacaggggttcactcttttctctgatgggaaacaccttgtaggactaggcttatgtttccctggttcttctcccaaataccggggctcacattctcccctgctatcacagggaggaaatcaatctcaatcaatcaatctctctctctctctctctctttttctctctctctcctcacaaatgagccacagatgtcctttttcccccttatcacagaaaaatgaaggattggaagcatgtaacatgctacttgattagagacactcccctttggccaaggatagatattgtcatcattaccctttctttccctatgttgaatatgaatctgcagcgaaagtgtcaaatattggcaggcttagaggacatagccagccaatggcctgtaaagcaaaatggtgaagcagttagacttcaattactgttcacaacaacagcaacaatgggtcctgaaatgtgtctctagtattagaaggaggtagacatcctgcctggaagactataggaatcctaaactttctaggcgttgaggacaaaggcttaccccttctccctcctatgggagatagttacttgcacagcccagatttcctcaggaaagttcagagatagttttaaaagaattatttactcttattttatgttatgttcatgcaagttttgcttgcttgcttgcatgtctgtgtaacatgtgcatgtagtgccaatggaggcaagaagaaggagaagtggggaggaggaagaggaggagaagaagaagaggaggagaagaagaagaggaggagaaagaggaggaggaggaggaggaggaggagaggaggaggaggaggaggaggaggaggaggagaagaagaagaagaagaagaagaagaagaagaagaagaagaagaagaagaagaagaagaagaagaagaagaagaaaaagaagaagaagaagaagaagaagaagaagaagaagaagaagaagaagaagaagaagaagaagaagaagaagaagaagaagaagaagaagatgatcttaactgctgagatgagcatctcttcagcccttggattttttattttttctttcatagaaagcaacaattttcaacctgtgcacctctatactcttgagagtcaaatgacactttcacagggttcacatatcagatatcctgtgtgtcagatatttatattgtaattcataacagaagcaaaattacagttattaagtagcaatgagaataattttacagctggggtcaccacagcatgtggaagggtcacggcatttggaaggttgagaaccactgatagcccgcctataatgtctgtgtgaacagtggtctcttggaccattgctgctcttcagaggggctctaccctgctctgccatcagctttgtcttctagactatactcattttaatctctgaattgtttttagtgaagatcacaagaacaaggggtcatgaacatgatctcagtgaaaaatggacctgacaaagcagagatctagaaaagtcttggtagtgccagttctccgtaagcccacgacatcagcttctttgtcatgggctccgatgcaaggataatgttgaagggttattagcaccctaggctaacttctgtgctctttactgaacccatgtaaggcatcactgttgatccccgttctgaagactgctgatgaatgactagccttttcactgatgcaaatgtaccttcttcctacagctttcagcaagggtgtgccaaggtgtgcagaaaatactaattccctctaaggacccttttggtcagaatcaaactgtatattcaacacaacatataggctctcctctgtacttattatacaaaagtcaaaaaatacatggcatagttataaaatgaagttttcagattttttttctcatttataaaactaagaccttcctgaatgttttattttttttttccattttttattaggtatttagctcatttacatttccaatgctataccaaaagtcccccttacccacccacccccactcccctacccacccactccccccctttggccctggcgttcccctgtaccgggtcacacaaagtctgcgtgtccaatgggcctctctttccagtgatggccgactaggccatcttttgatacatatgcagctagagtcaagagctcaggggtactggttagttcataatgttgttccacctatagggttgaagatccctttagctccttggatactttctctagctcctccattgggagccctgtgatccatccattagctgactgtgagcatccacttctgtgtttgctaggccccggcatagtctcacaagagacagctacatctgggtcctttcgataaaatcttgctagtatatgcaatggtgtcagcgtttggatgctgattatggggtggatccctggatatggcagtctctacatggtccatcctttcatctcagctccaaactttgtttctgtaactccttccatgggtgttttgttcccacttctaaggaggggcatagtgtccacacttcagtcttcatttttcttgagtttcatgtgtttaggaaattgtatcttatattgtgggtatcctaggttttgggctagtatccacttatcagtgagtacatattgtgtgagttcctttgtgattgtgttacctcactcaggatgatgctctccaggtccatccatttggctaggaatttcataaattcattctttttaatagctgagtagtactccattgtgtagatgtaccacattttctgtatccattcctctgttgaggggcatctgggttctttccagtttctggctattataaataaggctgctatgaacatagtggagcatgtgtccttcttaccagttggggcttcttctggatatatgcccaggagaggtattgctggatcctccggtagtactatgtccaattttctgaggaaccgccagactgatttccagagtggttgtacaagcctgcaatcccaccaacaatggaggagtgttcctctttctccacatcctcgccagcatctgctgtcacctgaatttttgatcttagccattctcactggtgtgaggtggaatctcagggttgttttgatttgcatttccctgatgattaaggatgttgaacattttttcaggtgcttctctgccattcggtattcctcaggtgagaattctttgttcagttctgagccccattttttaagggggttatttgattttctgaggtccaccttcttgagttctttatatatgttggatattagtcccctatctgatttaggataggtaaagatcctttcccagtctgttggtggtctttttgtcttatagacagtgtcttttgccttgcagaaactttggagtttcattaggtcccatttgtcaattctcgatcttatagcacaagccattgctgttctgttcaggaatttttcccctgtgcccatatcttcaaggcttttccccactttctcctctataagtttcagtgtctctggttttatgtgaagttccttgatccacttagatttgaccttagtacaaggagataagtatggatcgattcgcattcttctacatgataacaaccagttgtgccagcaccaattgttgaaaatgctgtctttcttccactggatggttttggctcccttgtcgaagatcaagtgaccataggtgtgtgggttcatttctgggtcttcaattctattccattggtccacttgtctgtctctataccagtaccatgcagtttttatcacaattgctctgtagtaaagctttaggtcaggcatggtgattccaccagaggttcttttatccttgagaagagtttttgctatcctcggttttttgttattccagatgaatttgcaaattgctccttctaattcgttgaagaattgagttggaattttaatggggattgcattgaatctgtagattgcttttggcaagatagccatttttacaatgttggtcctgccaatccatgagcatgggagatctttccatcttctgagatcttctttaatttctttcttcagggacttgaagtttttatcatacagatctttcacttccttcgttagagtcacgccgagatattttatattatttgtggctattgagaagggtgttgtttccctaatttctttctcagcctgtttattctttgtgtagagaaaggccattgacttgtttgagttaattttatatccagctatttcaccgaagctgtttatcaggtttaggagttctctgttggaatttttagggtcacttatatatactatcatatcatctgcaaaaagtgatattttgacttcctcttttccaatttgtatccccttgatctccttttgttgtcgaattgctctggctaatacttcaagtactatgttgaaaaggtagggagaaagtgggcagccttgtctagtccctgattttagtgggattgcttccagcttctctccatttactttgatgttggctactggtttgctgtagattgcttttatcatgtttaggtattggccttgaattcctgatctttccagaacttttatcatgaatgggtgttggatcttgtcaaatgctttttctgcatctaacgagatgatcatgtggtttttgtctttgagtttgtttatataatggattacattgatggattttcgtatattaaaccatccctgcatccctggaataaaacctacttggtcaggatggatgattgctttaatgtgttcttggattcggttagcgagaattttattaaggatttttgcatcgatgttcataagagaaattggtctgaagttctctatctttgttggatctttctgtggtttaggtatcagagtaatagtggcttcataaaatgagttgggtagaataccttctacttctatcttgtgaaaaagtttgtgcagaactggagttagatcttctttgaaggtctgatagaactctgcactaaacccgtctggtcctgggctttttttggctgggagactattaataactgcttctatttctttaggggatatgggactgtttagaaggtcaacttgatcctgattcaactttggtacctggtatctgtccagaaatttgtccatttcgtccaggttttccagttttgttgagtatagccttttgtagaaggatctgatggtgttttggatttctttttttttttttttttttttttttttttattaggtatttagctcatttacatttccaatgctataccaaaagtcccccttacccacccacccccactcccctacccacccactccccccctttggccctggcgttcccctgtaccggggcacacgaagtctgcgtgtccaatgggcctctctttccagtgatggccgactaggccatcttttgatacatatgcagctagagtcaaaagctcaggggtactggttagttcataatgttgttccacctatagggttgaagatccctttagctccttgggtactttctctagctcctccattgggagccctgcgatccatccattagctgactgtgagcatccacttctgtgtttgctaggccccggcatagtctcacaagagacagctacatctgggtcctttcagtaaaatcttgctagtgtatgcaatggtgtcagcatttggaagctgattatggggtggatccctggatatggcagtctctacatggtccattctttcatctcagctccatactttgtttctgtaactccttccatgggtgttttgttcccacttctaaggaggggcatagtgtccacacttcagtcttcatttttcttgagtttcatgtgtttaggaaattgtatcttatatcgtgggtatcctaggttttgggctagtatccacttatcagtgagtacatattgtgtgagttcctttgtgattgtgttgcctcactcaggatgatgctctccaggtccatccatttggctaggaatttcataaattcattctttttaatagctgagtagtactccattgtgtagatgtaccacattttctgtatccattcctctgttgaggggcatctgggttctttccagtttctggctattataaataaggctgctatgaacatagtggagcatgtgtccttcttaccagttggggcttcttctggatatatgcccaggagaggtattgctggatcctccggtagtactatgtccaattttctgaggaaccgccagactgatttccagagtggttgtacaagcctgcaatcccaccaacaatggaggagtgttcctctttctccacatcctcgccagcatctgctgtcgcctgaatttttgatcttagccattctcactggtgtgaggtggaatctcagggttgttttgatttgcatttccctgatgattaaggatgttgaacattttttcaggtgcttctctgccattcggtattcctcaggtgagaattctttgttcagttctgagccccattttttaagggggttatttgattttctgaggtccaccttcttgagttctttatatatgttggatattagtcccctatctgatttaggataggtaaagatcctttcccagtctgttggtggtctttttgtcttatagacagtgtcttttgccttgcagaaactttggagtttcattaggtcccatttgtcaattctcgatcttacagcacaagccattgctgttctgttcaggaatttttcccctgtgcccatatcttcaaggcttttccccactttctcctctataagtttgagtgtctctggttttatgtgaagttccttgatccacttagatttgaccttagtacaaggagataagtatggatcgattcgcattcttctacatgataacaaccagttgtgccagcaccaattgttgaaaatgctgtctttcttccactggatggttttggctcccttgtcgaagatcaagtgaccataggtgtgtgggttcatttctgggtcttcaattctattccattggtccacttgtctgtctctataccagtaccatgcagtttttatcacaattgctctgtagtaaagctttaggtcaggcatggtgattccaccagaggttcttttatccttgagaagagtttttgctattctcggttttttgttattccagatgaatttgcaaattgctccttctaattccttgaagaattgagttggaattttaatggggattgcattgaatctgtagattgcttttggcaagatagccatttttacaatgttggtcctgccaatccatgagcatgggagatctttccatcttctgagatcttctttaatttctttcttcagggacttgaagtttttatcatacagatctttcacttccttcgttagagtcacgccgagatattttatattatttgtggctattgagaagggtgttgtttccctaatttctttctcagcctgtttattctttgtgtagagaaaggccattgacttgtttgagttaattttatatccagctacttcaccgaagctgtttatcaggtttaggagttctctgttggaatttttagggtcacttatatatactatcatatcatctgtaaaaagtgatattttgacttcctcttttccaatttgtatccccttgatctccttttgttgtcgaattgctctggctaatacttcaagtactatgttgaaaaggtagggagaaagtgggcagccttgtctagtccctgattttagtgggattgcttccagcttctctccatttactttgatgttggctactggtttgctgtagattgcttttatcatgtttaggtattggccttgaattcctgatctttccagaacttttatcatgaatgggtgttggatcttgtcaaatgctttttctgcatctaacgagatgatcatgtggtttttgtctttgagtttgtttatataatggattacattgatggattttcgtatattaaaccatccctgcatccctggaataaaacctacttggtcaggatggatgattgctttaatgtgttcttggattcggttagcgagaattttattaagaatttttgcatcgatgttcataagagaaattggtctgaagttctctatctttgttggatctttctgtggtttaggtatcagagtaatagtggcttcataaaatgagttgggtagaataccttctacttctatcttgtgaaaaagtttgtgcagaactggagttagatcttctttgaaggtctgatagaactctgcactaaacccgtctggtcctgggctttttttggctgggagactattaataactgcttctatttctttaggggatatgggactgtttagaaggtcaacttgatcctgattcaactttggtacctggtatctgtccagaaatttgtccatttcgtccaggttttccagttttgttgagtatagccttttgtagaaggatctgatggtgttttggatttcttcaggatctgttgttatgtctcccttttcatttctgattttgttaattaggattttgtccctgtgccctttagtgagtctagctaagggtttatctatcttgttgattttctcaaagaaccaactcctcgtttggttaattctttgaatagttcttcttgtttccacttggttgatttcacccctgagtttgattatttcctgccgtctactcctcttgggtgaatttgcttcctttttttctagagcttttagatgtgttgtcaagctgctagtatgtgctctctcccattttttcttgaaggcactcatagctatgagtttccctcttagaaatgctttcattgtgtcccaaaggtttgggtacgttgtggcttcattttcattaaactctaaaaagtctttaatttctttctttattccttccttgaccaaggtatcattgagaagagtgttgttcagtttccatgtgaatgttggctttctgttatttattttgttattgaagatcagccttagtgcatggtgatctgataggatacatgggacaatttcaatatttttgaatctgttgaggcctgatttgtgacctattatgtggtcaattttggagaaggtaccatgaggtgctgagaagaaggtatatccttttgttttagggtaaaatgttctgtagatatctgtcagatccatttgtttcatcacttctgttagtttcagtgtgtccctgtttagtttctgtttccatgatctgtccattggtgaaagtggtgtgttgaagtctcccactattattgtgtgaggcgcaatgtgtgctttgagctttactaaagtttctttagtgaatgtggctgctcttgtatttggagcatagatattcagaattgagagttcctcttggaggattttacctttgatgagaatgaagtgtccctccttgtcttttttgatgactttgggttggaagtcaatcttatcagatattaggatggctactcctgcttgtttcttcataccatttgcttggaaaattgttttccagcctttcattctgaggtagtgtctatctttttctctgagatgagtttcctgtaagcagcaaaatgttgggtcttgtttgtgtagccagtttgttagtctatgtctttttattggcgagttgagaccattgatgttaagagatattaaggaaaagtaattgttgcttcctgttattttagttgttaaaggtggcattctgttcttgtggctgtcttcttttaggtttgttgagggattaccttcttgttttttctagggcgttgttcccgttcttgtattggtttttttctgttattatcctttgaagggctggattcgtggagagataatgggtgaatttagttttgtcgtggaatactttggtttctccatctatggtaattgagagtttggctgggtattgtagcctgggctggaatttgtgttctcttagtgtctgtataacatctgtccaggctcttctggctttcatagtctctggtgaaaaatctggtgtaattctgataggcttgcctttatatgttacttgacctttttcccttactgcttttagtattctatctttatttagtgcatttgatgttctgattattatgtgtcgggaggaatttcttttctggtccagtctatttggagttctgtaggcttcttgtatgttcatatgcatctcattctttagatttgggaagttttcttcaataattttgttgaagatgtttgctggacctttgagttgaaaatcttcattctcatccactcctattatccgtacgtttggtcttcttattgtgtcctggatttcctggatattttgagttaggatctttttgcattttccattttctttgattgttgtgccgatgttctctatggaatcttctgcacctgagattctctcttccatctcttgtattctgttgctgatgctcaaatctatggttccagatttttttcctagggtttctatctctagtgttgcctcgctttgagttttctttattgtgtctacttccctttttaggtctagtatggttttgttcatttccatcacctgtttgtatgttttttcctctttttctgtaaggacttctacctgtttgattgtgttttcctgtttttctttaaggacttgtaactctttagcagtgttctcctgtatttctttaagtgatttattaaagtccttcttgatgtcctctaccatcatcatgagatatgcttttaaatctaggtctaggttctcaggtgtgttggggttccctggactgggcgaagtgggtgtgctgggttctggtgatggtgagtggtcttggttcctgttagtaagattcctccgtttacctttcgccatctggtaatctctggagttagtagttatagttgactctgtttagagattgttcttctggtgattctgttaccgtctatcagcagacctgggagacagattctctcctctgagtttcagtgctcagagcactctctgctggcaagctctcttacagggaaggtgcgcagatatcttgtatttggacctcctcctggccgaagaagaaggcccaaaacaggacctttctcagacactgtgttgctttggcagttcccaggtggtacagactctaacctaagcagactaaattcctaagttccttggagtcccgggacgaagatggtgaccgctgctgctgtggcttaggccgcctcccctgccgggtgggcacctgtcctccggtccggaaggtggccggctgtccccggcccacacagggtgctgcctcagcgcctctgtgcttctgcctgttccagaagctgtcaggttctctggcgcaccctctcacctgttcagactaatttcctaagttcggcgggtcccggaccaagatggcgaccgctgctgctgtggcttaggccgcctccccagccgggtgggcacctgtcctctggtccggaaggtggccggctgtccccggcccacacagggtgctgcctcagcgcctctgtgcttctgcctgttccagaagctgtcaggttctctggcgcaccctctcacctgttcagactaattccctaagttcggcgggtcccggaccaagatggcgaccgctgctgctgtggcttaggtcgcctccccagccgggcgggcacctgtcctctggtccggaaggtggccggctgtccccggcccacacagggtgctgcctcagcccctctgtgcttctgcctgttccagaggctgtcaggttctctggcgcaccctctcacccgttcagactaatttcctaagttcagcgggtcccggaccaagatggcgaccgctgctgctgtggcccaggccgcctccccagccgggcgggcacctgtcctccggtccagacggtggctggctgtccccggcccacaaagggtgctgcctcagtgcctctgtgcctctgcctgttccagaggctgtcaggttctctggcgcaccctctcacctgttcagactaatttcctaagttcggcgggtcccggaccaagatccttcctgaatgttttaaaagagctagtatatgttttgtgtggggttttggttttttctttttcttctctctctctctctctctctctctctctctctctctctctctctctctctctctagaatgtttgcatttcaaatcacatagaatatgagacatttacttggaaaactagccttgcttagagggtcagggtggctggcctctgcttcctgctagcatccttggaagggcagagctattctcttcctctgaaaagcattctatacatttgcatgcatgagaagggaaggcacaaagcaatagtaaagccctcaattgatttcttctattttctttttcagcaaatgtccccagcaggccacaggtaagagttaatggttcaattgacttcgctttcttgatcccatctgggcgtaagcacattagctgctattgatttagtttagtcttacttcattctccatataaatgagtaaagccacgtgatgtttaagtgttacttggttctgtacaacagattgttgctttgaagatgttgggtgggaccatttggttccccaaaccaaactctatgaggcacccaaagtacccatgctggatttcagttctcattccatgctctctactatacaagtttctgtgtaaatctgactgacctcaaatctcacatttgtcacagaacagtgactttgaaatgtccctggtactacagggcaatactgagatcattactccaatgaagacagagttgcctttttcatttaagaaaatacgttgagctcttctggcatctttagcccagtagctttcagttttgtttggttccttatgaggagccattaattaaaatataccacggagccaaagcagatctttataaaacattttcttgagtgaatttattagtcctttcaaaacagtcaacattgtttcatcttattagcaagtggaactggggtcttggctagaagacaggtgtctgtaaagcagtctgtgacacagtaggtagggttagcatcttccggtgatgcccattgtcctggtccattggaagcaaggattttaaagggaagtgagatgacagaagaaccctcagaggtataagaagagatgggaagatgtgctcatgtgcagggaagcagacacatcccaaaacaatccatttgttaaaagtactcaagttagacatgttttttcaaaaatctacttcaaaattgtgtagcccgtatttagacccattggcattttccacatagcagacaccactagacatctgtctcctcctctctaggacatgaaggaatggggtactcttttggtagcctaacacatatatcatcgctacctttcccaagaagcaaagacctctcaatttgacctgggtttctagcctgtttaaaaaaaaaaaaaaaaaaaaaaaaaaagacgtcttgtcacccctggcctctgcttttatgttggtgttgactactgtaataaacagctggcatgtgacttcagggtgaaggaaatgtcctcatcccacatgagcagttgggggagggtcccctttgaacacagccatataaagttttagttagttctgaaagatgcccttattttcccatgaagaactgacaagtcttcattacctgaatgtccttatgcagatgctgttctgaccttggtgttttcccttgccacaggcaatgtgagcatctatccagccagccaacatttcccgaccttcagtattgccctcttctgcaaatgccaatcccaagacccattcaaccccaaagctccgtggctccacgacacaagctgttgagtgcttactgggtgttctactgagggaaccaaacactgactatccaaagagaaaaggatattttggttttctaataacgtatattattgttttcttctcccctttctatgcaactgtaaattaatgaacagagaagtatttggaggtggtaaagcatttgtcactgatttgtataatatatacagccatgggaaagtgggtgggggctttctaatatgaaactgtctttttaataaccaagagaaaaaattgcataagaattagaccactttacattattacattccttctgctgttcacattaaccttgtacaataacttcacttattatttgactgttttaccattatgttttggttatttataaatttatcagccatacaaacaaatagattctatgtatttgtttctataatctggccaaattcctaagttcatatatttgaatcaaatattttacatatgtggagtaggcaggcattctgaagatactatttaactttagttgacgtcacacacaccatcctttagtaaccactggatgactacactaaaaatcctgtggactttaacggcaagctgctggggtatttttcctcctgtttttattccttttttgtaagtagatcttgacgtctttatttatttcatcttgcaatctctataataaagaagactgtattgtaatagtctcaaaaaattattttaccaagggttaccatttaagcatattttcattttgattcagaaaccaaagttggtacaacctctcctagtacttgcaaccttggttttcatgagaaaacacacggcaggctttgcccattgtgaggagagcacacatcatgctcttcagtttcctttgaatagacttttattgttgtttttgtatttttcgagtcctgtgtaagttttgaaagctctggttgtttcctttgtgaaagcaggcagatacttattggctgtctcatttgaagctttggagcagatagtcagatgtctcatgacccctcacttggccagcagcacatccgagaaggatgtcactcacaagcctacaccacggcttctctagaatgaaatcagtgctcggatgattgtatccctgcctctacttctgagtgtgttcaactaggtattggcttctttttctttttcttttcttttttttttaatttaacacttaattgccgattttagagaaaccaaaaataaaggtgaaggtaatatgttttgattcaaacatatatgcttttaaaacatcaggacatgctaactttgggttctctttcactgggatctggccagaaggaggctgaaagttagaaattgctattcttttaggatcggttgggtgggttggggggcaagggtgtctatttgcagcatagatattttgagacgaagaaaattgttttatataaggggagagccatgatcacctttctacctcagaaccaccttcctccattgtgttggacatagctttatatgccgcagtgtgcaaaacctagggctgtagtcaggcctttccatacccaggaagcacctgtgtaaagaagatcaacagaaactcccggaactcagaaccccaagttgtagatttggtgtcgtccttgttcttgctttgaggagtcatgtattcttttatttcctgcctgtatttgtatgcaaaatgatctctatctgctattacagaaaaagctacacaaaacactacattgtaaccttctgagtaataaataagaggaaatatattacagtaaccatgatgagaaataagtgtattgttcttttgaaatatgtggttaatcgcagactgtcatctaatctgttacataccgtatttttcatcctgaataaaagtaattttaacacaaaatga

SEQ ID NO: 38 - protein, 3430 aa, Mus musculus
MAKYGDLEARPDDGQNEFSDIIKSRSDEHNDVQKKTFTKWINARFSKSGKPPISDMFSDLKDGRKLLDLLEGLTGTSLPKERGSTRVHALNNVNRVLQVLHQNNVDLVNIGGTDIVDGNPKLTLGLLWSIILHWQVKDVMKDIMSDLQQTNSEKILLSWVRQTTRPYSQVNVLNFTTSWTDGLAFNAVLHRHKPDLFSWDRVVKMSPIERLEHAFSKAHTYLGIEKLLDPEDVAVHLPDKKSIIMYLTSLFEVLPQQVTIDAIREVETLPRKYKKECEEEEIHIQSAVLAEEGQSPRAETPSTVTEVDMDLDSYQIALEEVLTWLLSAEDTFQEQDDISDDVEEVKEQFATHETFMMELTAHQSSVGSVLQAGNQLMTQGTLSEEEEFEIQEQMTLLNARWEALRVESMERQSRLHDALMELQKKQLQQLSSWLALTEERIQKMESLPLGDDLPSLQKLLQEHKSLQNDLEAEQVKVNSLTHMVVIVDENSGESATALLEDQLQKLGERWTAVCRWTEERWNRLQEISILWQELLEEQCLLEAWLTEKEEALNKVQTSNFKDQKELSVSVRRLAILKEDMEMKRQTLDQLSEIGQDVGQLLSNPKASKKMNSDSEELTQRWDSLVQRLEDSSNQVTQAVAKLGMSQIPQKDLLETVHVREQGMVKKPKQELPPPPPPKKRQIHVDVEAKKKFDAISTELLNWILKSKTAIQNTEMKEYKKSQETSGMKKKLKGLEKEQKENLPRLDELNQTGQTLREQMGKEGLSTEEVNDVLERVSLEWKMISQQLEDLGRKIQLQEDINAYFKQLDAIEETIKEKEEWLRGTPISESPRQPLPGLKDSCQRELTDLLGLHPRIETLCASCSALKSQPCVPGFVQQGFDDLRHHYQAVRKALEEYQQQLENELKSQPGPAYLDTLNTLKKMLSESEKAAQASLNALNDPIAVEQALQEKKALDETLENQKHTLHKLSEETKTLEKNMLPDVGKMYKQEFDDVQGRWNKVKTKVSRDLHLLEEITPRLRDFEADSEVIEKWVSGIKDFLMKEQAAQGDAAALQSQLDQCATFANEIETIESSLKNMREVETSLQRCPVTGVKTWVQARLVDYQSQLEKFSKEIAIQKSRLSDSQEKALNLKKDLAEMQEWMAQAEEDYLERDFEYKSPEELESAVEEMKRAKEEVLQKEVRVKILKDSIKLVAAKVPSGGQELTSEFNEVLESYQLLCNRIRGKCHTLEEVWSCWVELLHYLDLETTWLNTLEERVRSTEALPERAEAVHEALESLESVLRHPADNRTQIRELGQTLIDGGILDDIISEKLEAFNSRYEELSHLAESKQISLEKQLQVLRETDHMLQVLKESLGELDKQLTTYLTDRIDAFQLPQEAQKIQAEISAHELTLEELRKNVRSQPPTSPEGRATRGGSQMDMLQRKLREVSTKFQLFQKPANFEQRMLDCKRVLEGVKAELHVLDVRDVDPDVIQAHLDKCMKLYKTLSEVKLEVETVIKTGRHIVQKQQTDNPKSMDEQLTSLKVLYNDLGAQVTEGKQDLERASQLSRKMKKEAAVLSEWLSATEAELVQKSTSEGVIGDLDTEISWAKSILKDLEKRKVDLNGITESSAALQHLVLGSESVLEENLCVLNAGWSRVRTWTEDWCNTLLNHQNQLELFDGHVAHISTWLYQAEALLDEIEKKPASKQEEIVKRLLSELDDASLQVENVREQAIILVNARGSASRELVEPKLAELSRNFEKVSQHIKSARMLIGQDPSSYQGLDPAGTVQAAESFSDLENLEQDIENMLKVVEKHLDPNNDEKMDEEQAQIEEVLQRGEHLLHEPMEDSKKEKIRLQLLLLHTRYNKIKTIPIQQRKTIPVSSGITSSALPADYLVEINKILLTLDDIELSLNMPELNTTVYKDFSFQEDSLKSIKGQLDRLGEQIAVVHEKQPDVIVEASGPEAIQIRDMLAQLNAKWDRVNRVYSDRRGSFARAVEEWRQFHHDLDDLTQWLSEAEDLLVDTCAPDGSLDLEKARAQQLELEEGLSSHQPSLIKVNRKGEDLVQRLRPSEASFLKEKLAGFNQRWSTLVAEVEALQPRLKGESQQVLGYKRRLDEVTCWLTKVESAVQKRSTPDPEESPQELTDLAQETEVQAENIKWLNRAELEMLSDKNLSLREREKLSESLRNVNTTWTKVCREVPSLLKTRTQDPCSAPQMRMAAHPNVQKVVLVSSASDAPLRGGLEISVPADLDKTITELADWLVLIDQMLKSNIVTVGDVKEINKTVSRMKITKADLEQRHPQLDCVFTLAQNLKNKASSSDVRTAITEKLEKLKTQWESTQHGVELRRQQLEDMVVDSLQWDDHREETEELMRKYEARFYMLQQARRDPLSKQVSDNQLLLQELGSGDGVIMAFDNVLQKLLEEYSGDDTRNVEETTEYLKTSWVNLKQSIADRQSALEAELQTVQTSRRDLENFVKWLQEAETTANVLADASQRENALQDSVLARQLRQQMLDIQAEIDAHNDIFKSIDGNRQKMVKALGNSEEATMLQHRLDDMNQRWNDLKAKSASIRAHLEASAEKWNRLLASLEELIKWLNMKDEELKKQMPIGGDVPALQLQYDHCKVLRRELKEKEYSVLNAVDQARVFLADQPIEAPEEPRRNPQSKTELTPEERAQKIAKAMRKQSSEVREKWENLNAVTSNWQKQVGKALEKLRDLQGAMDDLDADMKEVEAVRNGWKPVGDLLIDSLQDHIEKTLAFREEIAPINLKVKTMNDLSSQLSPLDLHPSLKMSRQLDDLNMRWKLLQVSVDDRLKQLQEAHRDFGPSSQHFLSTSVQLPWQRSISHNKVPYYINHQTQTTCWDHPKMTELFQSLADLNNVRFSAYRTAIKIRRLQKALCLDLLELNTTNEVFKQHKLNQNDQLLSVPDVINCLTTTYDGLEQLHKDLVNVPLCVDMCLNWLLNVYDTGRTGKIRVQSLKIGLMSLSKGLLEEKYRCLFKEVAGPTEMCDQRQLGLLLHDAIQIPRQLGEVAAFGGSNIEPSVRSCFQQNNNKPEISVKEFIDWMHLEPQSMVWLPVLHRVAAAETAKHQAKCNICKECPIVGFRYRSLKHFNYDVCQSCFFSGRTAKGHKLHYPMVEYCIPTTSGEDVRDFTKVLKNKFRSKKYFAKHPRLGYLPVQTVLEGDNLETPITLISMWPEHYDPSQSPQLFHDDTHSRIEQYATRLAQMERTNGSFLTDSSSTTGSVEDEHALIQQYCQTLGGESPVSQPQSPAQILKSVEREERGELERIIADLEEEQRNLQVEYEQLKEQHLRRGLPVGSPPDSIVSPHHTSEDSELIAEAKLLRQHKGRLEARMQILEDHNKQLESQLHRLRQLLEQPDSDSRINGVSPWASPQHSALSYSLDTDPGPQFHQAASEDLLAPPHDTSTDLTDVMEQINSTFPSCSSNVPSRPQAM

SEQ ID NO: 39 - protein, 7 aa, Artificial Sequence
  Synthetic
PKKKRKV

SEQ ID NO: 40 - protein, 5 aa, Artificial Sequence
  Synthetic
  REPEAT (1)..(5): repeat 0 to 10 times
GGGGS

SEQ ID NO: 41 - protein, 5 aa, Artificial Sequence
  Synthetic
GGGGG

SEQ ID NO: 42 - protein, 5 aa, Artificial Sequence
  Synthetic
GGAGG

SEQ ID NO: 43 - protein, 7 aa, Artificial Sequence
  Synthetic
GGGGSSS

SEQ ID NO: 44 - protein, 7 aa, Artificial Sequence
  Synthetic
GGGGAAA

SEQ ID NO: 45 - DNA, 4560 bp, Artificial Sequence
  Synthetic
atggactacaaagaccatgacggtgattataaagatcatgacatcgattacaaggatgacgatgacaagatggcccccaagaagaagaggaaggtgggccgcggaatggacaagaagtactccattgggctcgccatcggcacaaacagcgtcggctgggccgtcattacggacgagtacaaggtgccgagcaaaaaattcaaagttctgggcaataccgatcgccacagcataaagaagaacctcattggcgccctcctgttcgactccggggaaaccgccgaagccacgcggctcaaaagaacagcacggcgcagatatacccgcagaaagaatcggatctgctacctgcaggagatctttagtaatgagatggctaaggtggatgactctttcttccataggctggaggagtcctttttggtggaggaggataaaaagcacgagcgccacccaatctttggcaatatcgtggacgaggtggcgtaccatgaaaagtacccaaccatatatcatctgaggaagaagcttgtagacagtactgataaggctgacttgcggttgatctatctcgcgctggcgcatatgatcaaatttcggggacacttcctcatcgagggggacctgaacccagacaacagcgatgtcgacaaactctttatccaactggttcagacttacaatcagcttttcgaagagaacccgatcaacgcatccggagttgacgccaaagcaatcctgagcgctaggctgtccaaatcccggcggctcgaaaacctcatcgcacagctccctggggagaagaagaacggcctgtttggtaatcttatcgccctgtcactcgggctgacccccaactttaaatctaacttcgacctggccgaagatgccaagcttcaactgagcaaagacacctacgatgatgatctcgacaatctgctggcccagatcggcgaccagtacgcagacctttttttggcggcaaagaacctgtcagacgccattctgctgagtgatattctgcgagtgaacacggagatcaccaaagctccgctgagcgctagtatgatcaagcgctatgatgagcaccaccaagacttgactttgctgaaggcccttgtcagacagcaactgcctgagaagtacaaggaaattttcttcgatcagtctaaaaatggctacgccggatacattgacggcggagcaagccaggaggaattttacaaatttattaagcccatcttggaaaaaatggacggcaccgaggagctgctggtaaagcttaacagagaagatctgttgcgcaaacagcgcactttcgacaatggaagcatcccccaccagattcacctgggcgaactgcacgctatcctcaggcggcaagaggatttctacccctttttgaaagataacagggaaaagattgagaaaatcctcacatttcggataccctactatgtaggccccctcgcccggggaaattccagattcgcgtggatgactcgcaaatcagaagagaccatcactccctggaacttcgaggaagtcgtggataagggggcctctgcccagtccttcatcgaaaggatgactaactttgataaaaatctgcctaacgaaaaggtgcttcctaaacactctctgctgtacgagtacttcacagtttataacgagctcaccaaggtcaaatacgtcacagaagggatgagaaagccagcattcctgtctggagagcagaagaaagctatcgtggacctcctcttcaagacgaaccggaaagttaccgtgaaacagctcaaagaagactatttcaaaaagattgaatgtttcgactctgttgaaatcagcggagtggaggatcgcttcaacgcatccctgggaacgtatcacgatctcctgaaaatcattaaagacaaggacttcctggacaatgaggagaacgaggacattcttgaggacattgtcctcacccttacgttgtttgaagatagggagatgattgaagaacgcttgaaaacttacgctcatctcttcgacgacaaagtcatgaaacagctcaagaggcgccgatatacaggatgggggcggctgtcaagaaaactgatcaatgggatccgagacaagcagagtggaaagacaatcctggattttcttaagtccgatggatttgccaaccggaacttcatgcagttgatccatgatgactctctcacctttaaggaggacatccagaaagcacaagtttctggccagggggacagtcttcacgagcacatcgctaatcttgcaggtagcccagctatcaaaaagggaatactgcagaccgttaaggtcgtggatgaactcgtcaaagtaatgggaaggcataagcccgagaatatcgttatcgagatggcccgagagaaccaaactacccagaagggacagaagaacagtagggaaaggatgaagaggattgaagagggtataaaagaactggggtcccaaatccttaaggaacacccagttgaaaacacccagcttcagaatgagaagctctacctgtactacctgcagaacggcagggacatgtacgtggatcaggaactggacatcaatcggctctccgactacgacgtggatgccatcgtgccccagtcttttctcaaagatgattctattgataataaagtgttgacaagatccgataaaaatagagggaagagtgataacgtcccctcagaagaagttgtcaagaaaatgaaaaattattggcggcagctgctgaacgccaaactgatcacacaacggaagttcgataatctgactaaggctgaacgaggtggcctgtctgagttggataaagccggcttcatcaaaaggcagcttgttgagacacgccagatcaccaagcacgtggcccaaattctcgattcacgcatgaacaccaagtacgatgaaaatgacaaactgattcgagaggtgaaagttattactctgaagtctaagctggtctcagatttcagaaaggactttcagttttataaggtgagagagatcaacaattaccaccatgcgcatgatgcctacctgaatgcagtggtaggcactgcacttatcaaaaaatatcccaagcttgaatctgaatttgtttacggagactataaagtgtacgatgttaggaaaatgatcgcaaagtctgagcaggaaataggcaaggccaccgctaagtacttcttttacagcaatattatgaattttttcaagaccgagattacactggccaatggagagattcggaagcgaccacttatcgaaacaaacggagaaacaggagaaatcgtgtgggacaagggtagggatttcgcgacagtccggaaggtcctgtccatgccgcaggtgaacatcgttaaaaagaccgaagtacagaccggaggcttctccaaggaaagtatcctcccgaaaaggaacagcgacaagctgatcgcacgcaaaaaagattgggaccccaagaaatacggcggattcgattctcctacagtcgcttacagtgtactggttgtggccaaagtggagaaagggaagtctaaaaaactcaaaagcgtcaaggaactgctgggcatcacaatcatggagcgatcaagcttcgaaaaaaaccccatcgactttctcgaggcgaaaggatataaagaggtcaaaaaagacctcatcattaagcttcccaagtactctctctttgagcttgaaaacggccggaaacgaatgctcgctagtgcgggcgagctgcagaaaggtaacgagctggcactgccctctaaatacgttaatttcttgtatctggccagccactatgaaaagctcaaagggtctcccgaagataatgagcagaagcagctgttcgtggaacaacacaaacactaccttgatgagatcatcgagcaaataagcgaattctccaaaagagtgatcctcgccgacgctaacctcgataaggtgctttctgcttacaataagcacagggataagcccatcagggagcaggcagaaaacattatccacttgtttactctgaccaacttgggcgcgcctgcagccttcaagtacttcgacaccaccatagacagaaagcggtacacctctacaaaggaggtcctggacgccacactgattcatcagtcaattacggggctctatgaaacaagaatcgacctctctcagctcggtggagacagcagggctgaccccaagaagaagaggaaggtggctagcgatgctaagtcactgactgcctggtcccggacactggtgaccttcaaggatgtgtttgtggacttcaccagggaggagtggaagctgctggacactgctcagcagatcctgtacagaaatgtgatgctggagaactataagaacctggtttccttgggttatcagcttactaagccagatgtgatcctccggttggagaagggagaagagccctggctggtggagagagaaattcaccaagagacccatcctgattcagagactgcatttgaaatcaaatcatcagttccgaaaaagaaacgcaaagtttga

SEQ ID NO: 46 - protein, 1519 aa, Artificial Sequence
  Synthetic
MDYKDHDGDYKDHDIDYKDDDDKMAPKKKRKVGRGMDKKYSIGLAIGTNSVGWAVITDEYKVPSKKFKVLGNTDRHSIKKNLIGALLFDSGETAEATRLKRTARRRYTRRKNRICYLQEIFSNEMAKVDDSFFHRLEESFLVEEDKKHERHPIFGNIVDEVAYHEKYPTIYHLRKKLVDSTDKADLRLIYLALAHMIKFRGHFLIEGDLNPDNSDVDKLFIQLVQTYNQLFEENPINASGVDAKAILSARLSKSRRLENLIAQLPGEKKNGLFGNLIALSLGLTPNFKSNFDLAEDAKLQLSKDTYDDDLDNLLAQIGDQYADLFLAAKNLSDAILLSDILRVNTEITKAPLSASMIKRYDEHHQDLTLLKALVRQQLPEKYKEIFFDQSKNGYAGYIDGGASQEEFYKFIKPILEKMDGTEELLVKLNREDLLRKQRTFDNGSIPHQIHLGELHAILRRQEDFYPFLKDNREKIEKILTFRIPYYVGPLARGNSRFAWMTRKSEETITPWNFEEVVDKGASAQSFIERMTNFDKNLPNEKVLPKHSLLYEYFTVYNELTKVKYVTEGMRKPAFLSGEQKKAIVDLLFKTNRKVTVKQLKEDYFKKIECFDSVEISGVEDRFNASLGTYHDLLKIIKDKDFLDNEENEDILEDIVLTLTLFEDREMIEERLKTYAHLFDDKVMKQLKRRRYTGWGRLSRKLINGIRDKQSGKTILDFLKSDGFANRNFMQLIHDDSLTFKEDIQKAQVSGQGDSLHEHIANLAGSPAIKKGILQTVKVVDELVKVMGRHKPENIVIEMARENQTTQKGQKNSRERMKRIEEGIKELGSQILKEHPVENTQLQNEKLYLYYLQNGRDMYVDQELDINRLSDYDVDAIVPQSFLKDDSIDNKVLTRSDKNRGKSDNVPSEEVVKKMKNYWRQLLNAKLITQRKFDNLTKAERGGLSELDKAGFIKRQLVETRQITKHVAQILDSRMNTKYDENDKLIREVKVITLKSKLVSDFRKDFQFYKVREINNYHHAHDAYLNAVVGTALIKKYPKLESEFVYGDYKVYDVRKMIAKSEQEIGKATAKYFFYSNIMNFFKTEITLANGEIRKRPLIETNGETGEIVWDKGRDFATVRKVLSMPQVNIVKKTEVQTGGFSKESILPKRNSDKLIARKKDWDPKKYGGFDSPTVAYSVLVVAKVEKGKSKKLKSVKELLGITIMERSSFEKNPIDFLEAKGYKEVKKDLIIKLPKYSLFELENGRKRMLASAGELQKGNELALPSKYVNFLYLASHYEKLKGSPEDNEQKQLFVEQHKHYLDEIIEQISEFSKRVILADANLDKVLSAYNKHRDKPIREQAENIIHLFTLTNLGAPAAFKYFDTTIDRKRYTSTKEVLDATLIHQSITGLYETRIDLSQLGGDSRADPKKKRKVASDAKSLTAWSRTLVTFKDVFVDFTREEWKLLDTAQQILYRNVMLENYKNLVSLGYQLTKPDVILRLEKGEEPWLVEREIHQETHPDSETAFEIKSSVPKKKRKV

SEQ ID NO: 47 - DNA, 3570 bp, Artificial Sequence
  Synthetic
atggccccaaagaagaagcggaaggtcggtatccacggagtcccagcagccaagcggaactacatcctgggcctggccatcggcatcaccagcgtgggctacggcatcatcgactacgagacacgggacgtgatcgatgccggcgtgcggctgttcaaagaggccaacgtggaaaacaacgagggcaggcggagcaagagaggcgccagaaggctgaagcggcggaggcggcatagaatccagagagtgaagaagctgctgttcgactacaacctgctgaccgaccacagcgagctgagcggcatcaacccctacgaggccagagtgaagggcctgagccagaagctgagcgaggaagagttctctgccgccctgctgcacctggccaagagaagaggcgtgcacaacgtgaacgaggtggaagaggacaccggcaacgagctgtccaccaaagagcagatcagccggaacagcaaggccctggaagagaaatacgtggccgaactgcagctggaacggctgaagaaagacggcgaagtgcggggcagcatcaacagattcaagaccagcgactacgtgaaagaagccaaacagctgctgaaggtgcagaaggcctaccaccagctggaccagagcttcatcgacacctacatcgacctgctggaaacccggcggacctactatgagggacctggcgagggcagccccttcggctggaaggacatcaaagaatggtacgagatgctgatgggccactgcacctacttccccgaggaactgcggagcgtgaagtacgcctacaacgccgacctgtacaacgccctgaacgacctgaacaatctcgtgatcaccagggacgagaacgagaagctggaatattacgagaagttccagatcatcgagaacgtgttcaagcagaagaagaagcccaccctgaagcagatcgccaaagaaatcctcgtgaacgaagaggatattaagggctacagagtgaccagcaccggcaagcccgagttcaccaacctgaaggtgtaccacgacatcaaggacattaccgcccggaaagagattattgagaacgccgagctgctggatcagattgccaagatcctgaccatctaccagagcagcgaggacatccaggaagaactgaccaatctgaactccgagctgacccaggaagagatcgagcagatctctaatctgaagggctataccggcacccacaacctgagcctgaaggccatcaacctgatcctggacgagctgtggcacaccaacgacaaccagatcgctatcttcaaccggctgaagctggtgcccaagaaggtggacctgtcccagcagaaagagatccccaccaccctggtggacgacttcatcctgagccccgtcgtgaagagaagcttcatccagagcatcaaagtgatcaacgccatcatcaagaagtacggcctgcccaacgacatcattatcgagctggcccgcgagaagaactccaaggacgcccagaaaatgatcaacgagatgcagaagcggaaccggcagaccaacgagcggatcgaggaaatcatccggaccaccggcaaagagaacgccaagtacctgatcgagaagatcaagctgcacgacatgcaggaaggcaagtgcctgtacagcctggaagccatccctctggaagatctgctgaacaaccccttcaactatgaggtggaccacatcatccccagaagcgtgtccttcgacaacagcttcaacaacaaggtgctcgtgaagcaggaagaagccagcaagaagggcaaccggaccccattccagtacctgagcagcagcgacagcaagatcagctacgaaaccttcaagaagcacatcctgaatctggccaagggcaagggcagaatcagcaagaccaagaaagagtatctgctggaagaacgggacatcaacaggttctccgtgcagaaagacttcatcaaccggaacctggtggataccagatacgccaccagaggcctgatgaacctgctgcggagctacttcagagtgaacaacctggacgtgaaagtgaagtccatcaatggcggcttcaccagctttctgcggcggaagtggaagtttaagaaagagcggaacaaggggtacaagcaccacgccgaggacgccctgatcattgccaacgccgatttcatcttcaaagagtggaagaaactggacaaggccaaaaaagtgatggaaaaccagatgttcgaggaaaagcaggccgagagcatgcccgagatcgaaaccgagcaggagtacaaagagatcttcatcaccccccaccagatcaagcacattaaggacttcaaggactacaagtacagccaccgggtggacaagaagcctaatagagagctgattaacgacaccctgtactccacccggaaggacgacaagggcaacaccctgatcgtgaacaatctgaacggcctgtacgacaaggacaatgacaagctgaaaaagctgatcaacaagagccccgaaaagctgctgatgtaccaccacgacccccagacctaccagaaactgaagctgattatggaacagtacggcgacgagaagaatcccctgtacaagtactacgaggaaaccgggaactacctgaccaagtactccaaaaaggacaacggccccgtgatcaagaagattaagtattacggcaacaaactgaacgcccatctggacatcaccgacgactaccccaacagcagaaacaaggtcgtgaagctgtccctgaagccctacagattcgacgtgtacctggacaatggcgtgtacaagttcgtgaccgtgaagaatctggatgtgatcaaaaaagaaaactactacgaagtgaatagcaagtgctatgaggaagctaagaagctgaagaagatcagcaaccaggccgagtttatcgcctccttctacaacaacgatctgatcaagatcaacggcgagctgtatagagtgatcggcgtgaacaacgacctgctgaaccggatcgaagtgaacatgatcgacatcacctaccgcgagtacctggaaaacatgaacgacaagaggccccccaggatcattaagacaatcgcctccaagacccagagcattaagaagtacagcacagacattctgggcaacctgtatgaagtgaaatctaagaagcaccctcagatcatcaaaaagggcaaaaggccggcggccacgaaaaaggccggccaggcaaaaaagaaaaagggatccgatgctaagtcactgactgcctggtcccggacactggtgaccttcaaggatgtgtttgtggacttcaccagggaggagtggaagctgctggacactgctcagcagatcctgtacagaaatgtgatgctggagaactataagaacctggtttccttgggttatcagcttactaagccagatgtgatcctccggttggagaagggagaagagccctggctggtggagagagaaattcaccaagagacccatcctgattcagagactgcatttgaaatcaaatcatcagttccgaaaaagaaacgcaaagtt

SEQ ID NO: 48 - protein, 1190 aa, Artificial Sequence
  Synthetic
MAPKKKRKVGIHGVPAAKRNYILGLAIGITSVGYGIIDYETRDVIDAGVRLFKEANVENNEGRRSKRGARRLKRRRRHRIQRVKKLLFDYNLLTDHSELSGINPYEARVKGLSQKLSEEEFSAALLHLAKRRGVHNVNEVEEDTGNELSTKEQISRNSKALEEKYVAELQLERLKKDGEVRGSINRFKTSDYVKEAKQLLKVQKAYHQLDQSFIDTYIDLLETRRTYYEGPGEGSPFGWKDIKEWYEMLMGHCTYFPEELRSVKYAYNADLYNALNDLNNLVITRDENEKLEYYEKFQIIENVFKQKKKPTLKQIAKEILVNEEDIKGYRVTSTGKPEFTNLKVYHDIKDITARKEIIENAELLDQIAKILTIYQSSEDIQEELTNLNSELTQEEIEQISNLKGYTGTHNLSLKAINLILDELWHTNDNQIAIFNRLKLVPKKVDLSQQKEIPTTLVDDFILSPVVKRSFIQSIKVINAIIKKYGLPNDIIIELAREKNSKDAQKMINEMQKRNRQTNERIEEIIRTTGKENAKYLIEKIKLHDMQEGKCLYSLEAIPLEDLLNNPFNYEVDHIIPRSVSFDNSFNNKVLVKQEEASKKGNRTPFQYLSSSDSKISYETFKKHILNLAKGKGRISKTKKEYLLEERDINRFSVQKDFINRNLVDTRYATRGLMNLLRSYFRVNNLDVKVKSINGGFTSFLRRKWKFKKERNKGYKHHAEDALIIANADFIFKEWKKLDKAKKVMENQMFEEKQAESMPEIETEQEYKEIFITPHQIKHIKDFKDYKYSHRVDKKPNRELINDTLYSTRKDDKGNTLIVNNLNGLYDKDNDKLKKLINKSPEKLLMYHHDPQTYQKLKLIMEQYGDEKNPLYKYYEETGNYLTKYSKKDNGPVIKKIKYYGNKLNAHLDITDDYPNSRNKVVKLSLKPYRFDVYLDNGVYKFVTVKNLDVIKKENYYEVNSKCYEEAKKLKKISNQAEFIASFYNNDLIKINGELYRVIGVNNDLLNRIEVNMIDITYREYLENMNDKRPPRIIKTIASKTQSIKKYSTDILGNLYEVKSKKHPQIIKKGKRPAATKKAGQAKKKKGSDAKSLTAWSRTLVTFKDVFVDFTREEWKLLDTAQQILYRNVMLENYKNLVSLGYQLTKPDVILRLEKGEEPWLVEREIHQETHPDSETAFEIKSSVPKKKRKV

SEQ ID NO: 49 - DNA, 2154 bp, Artificial Sequence
  Synthetic
ctgcccacctgcagctgtcttgatcgagttatacaaaaagacaaaggcccatattatacacaccttggggcaggaccaagtgttgctgctgtcagggaaatcatggagaataggtatggtcaaaaaggaaacgcaataaggatagaaatagtagtgtacaccggtaaagaagggaaaagctctcatgggtgtccaattgctaagtgggttttaagaagaagcagtgatgaagaaaaagttctttgtttggtccggcagcgtacaggccaccactgtccaactgctgtgatggtggtgctcatcatggtgtgggatggcatccctcttccaatggccgaccggctatacacagagctcacagagaatctaaagtcatacaatgggcaccctaccgacagaagatgcaccctcaatgaaaatcgtacctgtacatgtcaaggaattgatccagagacttgtggagcttcattctcttttggctgttcatggagtatgtactttaatggctgtaagtttggtagaagcccaagccccagaagatttagaattgatccaagctctcccttacatgaaaaaaaccttgaagataacttacagagtttggctacacgattagctccaatttataagcagtatgctccagtagcttaccaaaatcaggtggaatatgaaaatgttgcccgagaatgtcggcttggcagcaaggaaggtcgacccttctctggggtcactgcttgcctggacttctgtgctcatccccacagggacattcacaacatgaataatggaagcactgtggtttgtaccttaactcgagaagataaccgctctttgggtgttattcctcaagatgagcagctccatgtgctacctctttataagctttcagacacagatgagtttggctccaaggaaggaatggaagccaagatcaaatctggggccatcgaggtcctggcaccccgccgcaaaaaaagaacgtgtttcactcagcctgttccccgttctggaaagaagagggctgcgatgatgacagaggttcttgcacataagataagggcagtggaaaagaaacctattccccgaatcaagcggaagaataactcaacaacaacaaacaacagtaagccttcgtcactgccaaccttagggagtaacactgagaccgtgcaacctgaagtaaaaagtgaaaccgaaccccattttatcttaaaaagttcagacaacactaaaacttattcgctgatgccatccgctcctcacccagtgaaagaggcatctccaggcttctcctggtccccgaagactgcttcagccacaccagctccactgaagaatgacgcaacagcctcatgcgggttttcagaaagaagcagcactccccactgtacgatgccttcgggaagactcagtggtgccaatgctgcagctgctgatggccctggcatttcacagcttggcgaagtggctcctctccccaccctgtctgctcctgtgatggagcccctcattaattctgagccttccactggtgtgactgagccgctaacgcctcatcagccaaaccaccagccctccttcctcacctctcctcaagaccttgcctcttctccaatggaagaagatgagcagcattctgaagcagatgagcctccatcagacgaacccctatctgatgaccccctgtcacctgctgaggagaaattgccccacattgatgagtattggtcagacagtgagcacatctttttggatgcaaatattggtggggtggccatcgcacctgctcacggctcggttttgattgagtgtgcccggcgagagctgcacgctaccactcctgttgagcaccccaaccgtaatcatccaacccgcctctcccttgtcttttaccagcacaaaaacctaaataagccccaacatggttttgaactaaacaagattaagtttgaggctaaagaagctaagaataagaaaatgaaggcctcagagcaaaaagaccaggcagctaatgaaggtccagaacagtcctctgaagtaaatgaattgaaccaaattccttctcataaagcattaacattaacccatgacaatgttgtcaccgtgtccccttatgctctcacacacgttgcggggccctataaccattgggtc

SEQ ID NO: 50 - protein, 718 aa, Artificial Sequence
  Synthetic
LPTCSCLDRVIQKDKGPYYTHLGAGPSVAAVREIMENRYGQKGNAIRIEIVVYTGKEGKSSHGCPIAKWVLRRSSDEEKVLCLVRQRTGHHCPTAVMVVLIMVWDGIPLPMADRLYTELTENLKSYNGHPTDRRCTLNENRTCTCQGIDPETCGASFSFGCSWSMYFNGCKFGRSPSPRRFRIDPSSPLHEKNLEDNLQSLATRLAPIYKQYAPVAYQNQVEYENVARECRLGSKEGRPFSGVTACLDFCAHPHRDIHNMNNGSTVVCTLTREDNRSLGVIPQDEQLHVLPLYKLSDTDEFGSKEGMEAKIKSGAIEVLAPRRKKRTCFTQPVPRSGKKRAAMMTEVLAHKIRAVEKKPIPRIKRKNNSTTTNNSKPSSLPTLGSNTETVQPEVKSETEPHFILKSSDNTKTYSLMPSAPHPVKEASPGFSWSPKTASATPAPLKNDATASCGFSERSSTPHCTMPSGRLSGANAAAADGPGISQLGEVAPLPTLSAPVMEPLINSEPSTGVTEPLTPHQPNHQPSFLTSPQDLASSPMEEDEQHSEADEPPSDEPLSDDPLSPAEEKLPHIDEYWSDSEHIFLDANIGGVAIAPAHGSVLIECARRELHATTPVEHPNRNHPTRLSLVFYQHKNLNKPQHGFELNKIKFEAKEAKNKKMKASEQKDQAANEGPEQSSEVNELNQIPSHKALTLTHDNVVTVSPYALTHVAGPYNHWV

SEQ ID NO: 51 - DNA, 86 bp, Artificial Sequence
  Synthetic
gtttaagagctatgctggaaacagcatagcaagtttaaataaggctagtccgttatcaacttgaaaaagtggcaccgagtcggtgc

SEQ ID NO: 52 - RNA, 86 nt, Artificial Sequence
  Synthetic
guuuaagagcuaugcuggaaacagcauagcaaguuuaaauaaggcuaguccguuaucaacuugaaaaaguggcaccgagucggugc

SEQ ID NO: 53 - DNA, 23 bp, Artificial Sequence
  Synthetic
aacacacagctgggttatcagag

SEQ ID NO: 54 - DNA, 22 bp, Artificial Sequence
  Synthetic
gaactggtgggaaatggtctag

SEQ ID NO: 55 - DNA, 21 bp, Artificial Sequence
  Synthetic
ccccaaaatgtgaaatacttg

SEQ ID NO: 56 - DNA, 21 bp, Artificial Sequence
  Synthetic
atagctgatagtagttgagag

SEQ ID NO: 57 - DNA, 21 bp, Artificial Sequence
  Synthetic
tatgaatagtgttggacactg

SEQ ID NO: 58 - DNA, 21 bp, Artificial Sequence
  Synthetic
gcagggtcgtattgttgtgcc

SEQ ID NO: 59 - DNA, 21 bp, Artificial Sequence
  Synthetic
cacacagctgggttatcagag

SEQ ID NO: 60 - DNA, 21 bp, Artificial Sequence
  Synthetic
atactaaataccaacacacag

SEQ ID NO: 61 - DNA, 21 bp, Artificial Sequence
  Synthetic
ataatctagaacgaacgggta

SEQ ID NO: 62 - DNA, 21 bp, Artificial Sequence
  Synthetic
tgaaatggcctgtgctcatga

SEQ ID NO: 63 - DNA, 21 bp, Artificial Sequence
  Synthetic
tagaacgaacgggtaaagagt

SEQ ID NO: 64 - DNA, 21 bp, Artificial Sequence
  Synthetic
gtgtattgcttgtactactca

SEQ ID NO: 65 - DNA, 21 bp, Artificial Sequence
  Synthetic
aagatatataatgtcatgaat

SEQ ID NO: 66 - DNA, 21 bp, Artificial Sequence
  Synthetic
tcttgcatcttgcacatgtcc

SEQ ID NO: 67 - DNA, 21 bp, Artificial Sequence
  Synthetic
gaatggagagaggtaagtctg

SEQ ID NO: 68 - DNA, 21 bp, Artificial Sequence
  Synthetic
ttatctgcccatgactggcgc

SEQ ID NO: 69 - DNA, 21 bp, Artificial Sequence
  Synthetic
tttcattgtctgctccaagca

SEQ ID NO: 70 - DNA, 21 bp, Artificial Sequence
  Synthetic
tgaatccataatctagaacga

SEQ ID NO: 71 - DNA, 21 bp, Artificial Sequence
  Synthetic
gtggatagcttgatggataat

SEQ ID NO: 72 - DNA, 21 bp, Artificial Sequence
  Synthetic
aggtagatagagaggcacagt

SEQ ID NO: 73 - DNA, 21 bp, Artificial Sequence
  Synthetic
caatttgccttctccaatgat

SEQ ID NO: 74 - DNA, 21 bp, Artificial Sequence
  Synthetic
aactggtgggaaatggtctag

SEQ ID NO: 75 - DNA, 21 bp, Artificial Sequence
  Synthetic
gtgttattacttgctactgca

SEQ ID NO: 76 - DNA, 21 bp, Artificial Sequence
  Synthetic
cagaatcaaatataatagtct

SEQ ID NO: 77 - DNA, 21 bp, Artificial Sequence
  Synthetic
gaatcctttgttgccagactg

SEQ ID NO: 78 - DNA, 21 bp, Artificial Sequence
  Synthetic
agcaagtaataacacaagctt

SEQ ID NO: 79 - RNA, 21 nt, Artificial Sequence
  Synthetic
ccccaaaaugugaaauacuug

SEQ ID NO: 80 - RNA, 21 nt, Artificial Sequence
  Synthetic
auagcugauaguaguugagag

SEQ ID NO: 81 - RNA, 21 nt, Artificial Sequence
  Synthetic
uaugaauaguguuggacacug

SEQ ID NO: 82 - RNA, 21 nt, Artificial Sequence
  Synthetic
gcagggucguauuguugugcc

SEQ ID NO: 83 - RNA, 21 nt, Artificial Sequence
  Synthetic
cacacagcuggguuaucagag

SEQ ID NO: 84 - RNA, 21 nt, Artificial Sequence
  Synthetic
auacuaaauaccaacacacag

SEQ ID NO: 85 - RNA, 21 nt, Artificial Sequence
  Synthetic
auaaucuagaacgaacgggua

SEQ ID NO: 86 - RNA, 21 nt, Artificial Sequence
  Synthetic
ugaaauggccugugcucauga

SEQ ID NO: 87 - RNA, 21 nt, Artificial Sequence
  Synthetic
uagaacgaacggguaaagagu

SEQ ID NO: 88 - RNA, 21 nt, Artificial Sequence
  Synthetic
guguauugcuuguacuacuca

SEQ ID NO: 89 - RNA, 21 nt, Artificial Sequence
  Synthetic
aagauauauaaugucaugaau

SEQ ID NO: 90 - RNA, 21 nt, Artificial Sequence
  Synthetic
ucuugcaucuugcacaugucc

SEQ ID NO: 91 - RNA, 21 nt, Artificial Sequence
  Synthetic
gaauggagagagguaagucug

SEQ ID NO: 92 - RNA, 21 nt, Artificial Sequence
  Synthetic
uuaucugcccaugacuggcgc

SEQ ID NO: 93 - RNA, 21 nt, Artificial Sequence
  Synthetic
uuucauugucugcuccaagca

SEQ ID NO: 94 - RNA, 21 nt, Artificial Sequence
  Synthetic
ugaauccauaaucuagaacga

SEQ ID NO: 95 - RNA, 21 nt, Artificial Sequence
  Synthetic
guggauagcuugauggauaau

SEQ ID NO: 96 - RNA, 21 nt, Artificial Sequence
  Synthetic
agguagauagagaggcacagu

SEQ ID NO: 97 - RNA, 21 nt, Artificial Sequence
  Synthetic
caauuugccuucuccaaugau

SEQ ID NO: 98 - RNA, 21 nt, Artificial Sequence
  Synthetic
aacuggugggaaauggucuag

SEQ ID NO: 99 - RNA, 21 nt, Artificial Sequence
  Synthetic
guguuauuacuugcuacugca

SEQ ID NO: 100 - RNA, 21 nt, Artificial Sequence
  Synthetic
cagaaucaaauauaauagucu

SEQ ID NO: 101 - RNA, 21 nt, Artificial Sequence
  Synthetic
gaauccuuuguugccagacug

SEQ ID NO: 102 - RNA, 21 nt, Artificial Sequence
  Synthetic
agcaaguaauaacacaagcuu

SEQ ID NO: 103 - RNA, 23 nt, Artificial Sequence
  Synthetic
aacacacagcuggguuaucagag

SEQ ID NO: 104 - RNA, 22 nt, Artificial Sequence
  Synthetic
gaacuggugggaaauggucuag

1. A method of screening for a pair of gRNA molecules for editing a genomic nucleic acid in a subject, the method comprising:
(a) generating a plurality of pairs of gRNA molecules, each pair comprising a first gRNA and a second gRNA, wherein the first gRNA targets a first nucleic acid sequence and the second gRNA targets a second nucleic acid sequence;
(b) expressing a Cas9 protein or a fusion protein comprising the Cas9 protein, and the plurality of pairs of gRNA molecules in a plurality of cells, wherein one pair of gRNA molecules is expressed in a cell, and wherein the first gRNA directs the Cas9 protein or fusion protein to cut the first nucleic acid sequence and the second gRNA directs the Cas9 protein or fusion protein to cut the second nucleic acid sequence.

2. The method of claim 1, wherein expressing the Cas9 protein or the fusion protein comprising the Cas9 protein, and the plurality of pairs of gRNA molecules in the plurality of cells, wherein one pair of gRNA molecules is expressed in a cell, and wherein the first gRNA directs the Cas9 protein or fusion protein to cut the first nucleic acid sequence and the second gRNA directs the Cas9 protein or fusion protein to cut the second nucleic acid sequence in step (b), thereby forms an excised nucleic acid and a new junction in the genomic nucleic acid.

3. The method of claim 2, wherein the excised nucleic acid is in-frame.

4. The method of any one of claims 1-3, wherein the genomic nucleic acid comprises at least one exon of a dystrophin gene,
wherein the first nucleic acid sequence comprises a first intron of the dystrophin gene and the second nucleic acid sequence comprises a second intron of the dystrophin gene, and
wherein the first intron is adjacent to one side of the at least one exon and the second intron is adjacent to the other side of the at least one exon.

5. The method of claim 4, wherein the at least one exon is in between the first and second introns in the genomic nucleic acid.

6. The method of any one of claims 1-5, wherein the genomic nucleic acid comprises two or more exons of a dystrophin gene,
wherein the first nucleic acid sequence comprises a first intron of the dystrophin gene and the second nucleic acid sequence comprises a second intron of the dystrophin gene, and
wherein the first intron is adjacent to one side of the two or more exons and the second intron is adjacent to the other side of the two or more exons.

7. The method of claim 6, wherein the two or more exons are in between the first and second introns in the genomic nucleic acid.

8. The method of any one of claims 1-7, wherein the expression is effected by transfecting the plurality of cells with a plurality of vectors, wherein each cell is transfected with a first vector encoding one pair of gRNA molecules and a second vector encoding the Cas9 protein or fusion protein, wherein each cell is transfected with a different first vector encoding a different pair of gRNA molecules.

9. The method of claim 8, wherein the first vector and second vector are each a viral vector.

10. The method of claim 9, wherein the viral vector is a lentiviral vector, a AAV vector, or an adenoviral vector.

11. The method of any one of claims 1-10, the method further comprising:
(c) isolating the genomic nucleic acid from the plurality of cells; and/or
(d) contacting the genomic nucleic acid with a first pool of probes, wherein one or more different probes specifically bind to each new junction and a portion of the first nucleic acid sequence; and/or
(e) isolating the genomic nucleic acid bound to the first pool of probes; and/or
(f) contacting the genomic nucleic acid bound to the first pool of probes with a second pool of probes, wherein one or more different probes specifically bind to each new junction and a portion of the second nucleic acid sequence; and/or
(g) isolating the genomic nucleic acid bound to the first and second pools of probes; and/or
(h) sequencing the isolated genomic nucleic acid bound to the first and second pools of probes; and/or
(i) aligning the sequenced isolated genomic nucleic acid to identify the sequenced new junctions; and/or
(j) assigning each sequenced new junction to the corresponding pair of gRNA molecules.

12. The method of claim 11, wherein step (i) comprises computationally aligning the sequences of the isolated genomic nucleic acid to identify the sequenced new junctions.

13. The method of claim 12 or 13, further comprising identifying the pair of gRNA molecules having a greater number of sequenced new junctions as the pair of gRNA molecules having greater efficiency.

14. The method of any one of claims 11-13, wherein the probes each have a length of about 100 bp to about 140 bp.

15. The method of any one of claims 1-14, wherein the excised nucleic acid comprises exon 51 of the dystrophin gene.

16. The method of any one of claims 1-15, wherein the excised nucleic acid comprises exons 45-55 of the dystrophin gene.

17. The method of any one of claims 1-15, wherein the first nucleic acid sequence is within intron 50 of the dystrophin gene.

18. The method of any one of claims 1-15, wherein the second nucleic acid sequence is within intron 51 of the dystrophin gene.

19. The method of any one of claims 1-16, wherein the first nucleic acid sequence is within intron 44 of the dystrophin gene.

20. The method of any one of claims 1-16, wherein the second nucleic acid sequence is within intron 55 of the dystrophin gene.

21. The method of any one of claims 1-20, wherein the probes are biotinylated probes.

22. A pair of gRNA molecules identified by the method of any one of the preceding claims.

23. A CRISPR/Cas9 system comprising the pair of gRNA molecules of claim 22.

24. A gRNA molecule that binds and targets a polynucleotide sequence, and wherein the gRNA molecule binds or is encoded by a polynucleotide comprising a sequence selected from SEQ ID NOs: 55-78, or wherein the gRNA molecule comprises a polynucleotide sequence selected from SEQ ID NOs: 79-102.

25. A transgenic mouse whose genome comprises:
a mutation in the mouse dystrophin gene;
a mutant human dystrophin gene on chromosome 5; and
a mutation in the mouse utrophin gene.

26. The mouse of claim 25, wherein the mutation in the mouse dystrophin gene comprises an insertion or deletion in the mouse dystrophin gene that prevents protein expression from the mouse dystrophin gene.

27. The mouse of claim 26, wherein the mutation in the mouse dystrophin gene comprises a premature stop codon in exon 23 of the mouse dystrophin gene.

28. The mouse of any one of claims 25-27, wherein the mutant human dystrophin gene has at least one exon deleted.

29. The mouse of any one of claims 25-28, wherein the mutant human dystrophin gene has exon 52 deleted.

30. The mouse of any one of claims 25-29, wherein the mutation in the mouse utrophin gene is a functional deletion of the mouse utrophin gene.

31. The mouse of any one of claims 25-29, wherein the mutation in the mouse utrophin gene comprises an insertion or deletion in the mouse utrophin gene that prevents protein expression from the mouse utrophin gene.

32. The mouse of claim 31, wherein the mutation in the mouse utrophin gene comprises an insertion in exon 7 of the mouse utrophin gene.

33. The mouse of any one of claims 25-29, wherein the mutation in the mouse utrophin gene comprises a deletion of the entire mouse utrophin gene.

34. The mouse of any one of claims 25-33, wherein the mouse is heterozygous for the mutation in the mouse utrophin gene.

35. The mouse of any one of claims 25-33, wherein the mouse is homozygous for the mutation in the mouse utrophin gene.

36. The mouse of any one of claims 25-35, wherein the mouse has reduced life span, reduced body mass, reduced body strength, reduced motor coordination, reduced balance, and/or reduced forelimb strength as compared to a wild-type mouse.

37. The mouse of any one of claims 25-35, wherein the mouse has reduced life span, reduced body mass, reduced body strength, reduced motor coordination, reduced balance, and/or reduced forelimb strength as compared to a control mouse whose genome comprises a wild-type utrophin gene and a mutation in the mouse dystrophin gene.

38. The mouse of any one of claims 25-35, wherein the mouse has reduced lifespan, reduced body mass, reduced body strength, reduced motor coordination, reduced balance, and/or reduced forelimb strength as compared to a control mouse whose genome comprises a wild-type utrophin gene, a mutation in the mouse dystrophin gene, and a mutant human dystrophin gene.

39. The mouse of any of claims 25-38, wherein the mouse has increased muscle damage as compared to (i) a wild-type mouse, (ii) a control mouse whose genome comprises a wild-type utrophin gene and a mutation in the mouse dystrophin gene, and/or (iii) a control mouse whose genome comprises a wild-type utrophin gene, a mutation in the mouse dystrophin gene, and a mutant human dystrophin gene.

40. The mouse of claim 39, wherein the muscle damage comprises one or more of degeneration of the muscle, fibrosis of the muscle, and elevated serum creatine kinase.

41. The mouse of any one of claims 25-40, wherein the mouse does not exhibit detectable dystrophin protein in heart or skeletal muscle.

42. The mouse of any one of claims 25-41, wherein the mouse is a hDMDΔ52/mdx/Utrn KO mouse.

43. An isolated cell or biological material obtained from the mouse of any one of claims 25-42.

44. The biological material of claim 43, comprising a protein, a lipid, a nucleotide, fat, muscle, or a tissue.

45. A method of correcting a dystrophin gene mutation, the method comprising administering to the mouse of any one of claims 25-42 a CRISPR/Cas9 gene editing composition.

46. The method of claim 45, wherein the CRISPR/Cas9 gene editing composition comprises:
(a) at least one guide RNA (gRNA) targeting the mutant human dystrophin gene; and
(b) a Cas9 protein or a fusion protein comprising the Cas9 protein.

47. The method of claim 46, wherein the CRISPR/Cas9 gene editing composition comprises a first gRNA and a second gRNA, and wherein the first gRNA and the second gRNA are configured to form a first and a second double strand break in a first and a second intron flanking exon 51 of the mutant human dystrophin gene, respectively, thereby deleting exon 51.

48. The method of claim 47, wherein the CRISPR/Cas9 gene editing composition comprises a first gRNA and a second gRNA, and wherein the first gRNA and the second gRNA are configured to form a first and a second double strand break in a first and a second intron flanking exons 45-55 of the mutant human dystrophin gene, respectively, thereby deleting exons 45-55.

49. The method of any one of claims 45-48, wherein the dystrophin gene mutation is corrected in a cell of the mouse, and wherein the cell is a muscle cell, a satellite cell, or an iPSC/iCM.

50. The method of any one of claims 45-49, wherein the correction restores the reading frame of the human dystrophin gene.

51. The method of any one of claims 45-50, wherein the correction results in expression of an at least partially functional human dystrophin protein.

52. A gamete produced by the mouse of any one of claims 25-42.

53. The gamete of claim 52, wherein the gamete does not encode a functional mouse dystrophin protein or a functional mouse utrophin protein.

54. An isolated mouse cell, or a progeny cell thereof, isolated from the mouse of any one of claims 25-42.

55. A primary cell culture or a secondary cell line derived from the mouse of any one of claims 25-42.

56. A tissue or organ explant or culture thereof, derived from the mouse of any one of claims 25-42

57. A method of screening therapeutic agents for treating Duchenne muscular dystrophy (DMD), the method comprising administering to the mouse of any one of claims 25-42 one or more therapeutic agents.

58. The method of claim 57, wherein the one or more therapeutic agents comprises a small molecule, anti-sense RNA, vector, CRISPR/Cas gene editing system, or biological agent, or a combination thereof.

59. The method of claim 58, wherein the vector is a viral vector encoding a gene of interest.

60. The method of claim 59, wherein the viral vector is an AAV vector.

61. The method of any one of claims 57-60, wherein the mouse after administration of the one or more therapeutic agents exhibits increased lifespan, reduced body mass, increased body strength, increased motor coordination, increased balance, increased forelimb strength, reduced muscle injury, and/or reduced CK level compared to before administration of the one or more therapeutic agents.

62. The method of any one of claims 57-61, wherein the mouse after administration of the one or more therapeutic agents exhibits increased expression of a dystrophin gene as compared to before administration of the one or more therapeutic agents.

63. The method of claim 62, wherein the dystrophin gene is a truncated human dystrophin gene.

64. The method of claim 63, wherein the truncated human dystrophin gene comprises a plurality of deletions relative to a wild-type human dystrophin gene, and wherein at least one of the deletions is in exon 52.
